United States Patent Application Publication US 2026/0191916 A1 - sequence listing, part 63

SEQ ID NO: 336 - DNA, 3812473 bp, Raoultibacter massiliensis (residues 1,906,238-3,812,473 of 3,812,473)
  source 1..3812473: mol_type = genomic DNA
aacaagcacgcctcctttcacctactgcatctcgcttgaggcagaaccacgtttaacgcaaatcgttcgatgtcctttcggcgcagggcggctatagtccctcccatagaccgctccgccaggacagcgccgcaagttgcactcacgacaacgtcattcgaaagctgggaggtaccatgagcgagaaagatcaatcgttttccatgggtcgtcggtggctggttttctctatcgttttcatcatcgggattttatcggcgtacagtatgttcaaagcaccgccgctgttttcgacaatcatccccgaactcggatttaccgacgagaacatcggttgggttatgtcgatgttctcgataatcggcgtcgtgctggcgtttccagcgggcgctatccttgcgaaactgggtatcaaaaagagcctcatcataacagccgcgagcctggccatcggcagcgcgatcggagccgtagccagcaacgtggcgattcttttggcttcgcgcttcatcgaaggaatcgggatgggcttgatttcggttgtggggccggccgccatcgcaaccatcattccacgtgcgaaacagggcttggcaatgggcatttggtcggtatggttccccgccggtaccgtgctcgcgttcaacaccgcccccgcattggccgcaggccttgggtggcgatcggtttggtgggtttctgcggcgctttgcctggcagccctcgtgttcgcgttgctatgctattcgcagccacctgctgaaaaaaccgaagacgggcaaaccgcaaccggcgtcacgcgcaagcccgacatgttcagcatcatcatggttgccgtggcgtttatgacatggaacgcattcaacgcaggcgccatcagcagcttctacccgacattcttggcagacgtccattcgatggatccgcaggcctcgggcttcgtcgcaagcatcaccaacctgtgcgtgctggcgctcgggcccatatcgggcatcgtatcggacaagattggaacacgcaaaggtctgctggtattcgcattcgtaggcgcgatcatattcctgacgttcggcttctccgacaacatcacgctcatctacgtattcgtaatcggattcgcgttcttctcggcatcgtgcgcaacaggcacattctccatcatccccgagctcacgcatcagcctgagaagatcggcttcagcatggcgatcgtcgccttccttcagaacctcggcatcgtcatcggttcggccgttttccccgtagtcgccgccggccttgcttggaactggaataccgcatcgctcgcgttttgcgtaccgctggccgtcgtcggtttggtctgcgtcgtcctcgtacgcgaaaaggcgaatcgcagctgatccctgcgacttcgagcctcttgggtgcttcggctgtaacgcgcgcccgcatgccgtgcagtctatcgaattgtattggtctcgacagaaggaggtattccatggatcggacggaattcatggcgttggatccgcaggataaggccgataagctgaacatgcttatcggcgaaggcaaaacccaaaaggaggcgatgggtgcattcggcatcaccatcaaagaccttatggcaacgcaggtgcttttttccaaagcggaaggcgtattcatctccaaagcggtaggcggtttttcgaatttccacagcgacacgactgccgacgccgcaaagtaacggtttttcgcgatctgggttagtttgaaacccgcctggaaggaccgcttttcgcagccgcccgtccgagcacaccgcttgcccgcatcgcataggtatcttttcatcgcattgctgataagagaggaggcacaatgtcaagagaatcgattgtagagaaactcagcgagcgccatgagggggtggagcatttttacaccacgtgccacaacaacggctgctgggatgctacttgcctcataaagtgcggcgtgaaggacggcaagatcgtttccatcgaaccggacgattccgtgaacgcgggcattgcacgcgaagacgacaacgaagaggccgtgcaaaccggcatgcttcaggctcgcgcatgccccatgggacacgcgtggcgccaggaactgtattccgaagaccgtctgttgtaccccatgaagcgcatcggcgaaaaaggggccggcaaagggcacttcgaacgcatttcctgggaagaggcactcgacaccatcgccagcaaaatgaagcagatggccgatgaaaaccccgataacccctggctctactactgctactacgtcgcattcgaaagctccgacttcccgtttgcatcctacatgcccggcaccatcaccggctggggcgaccactccacttcgggcggcgcagcggcagaggacttccatctgggcgttcgcctgaccgacatcctgatcaaaggcacaagcgacgcctatcccggcttcgaagcccctgacctgcttaactccaaactggtagtgctgtggggcttcgaccccatggtcgcctggttcggccatgttccctactacatgaagctcgcccaggaacgaggctgcaagttcatcctgatcgatccggtgtacaacgtcagcgccgagtgcctgggcgcccagtggatccccatccgccccggcaccgacaccgcgttcggcctcgcagtcgcccacgtcctctacaccgaagatctctacgaccatgaatacgtggcgcagtgggtcgagcccgaaggattcgaggaatggcgcaagtacatcgtcggcgaagtcgacggcgtggagcacacccctgaatgggccgaacccatctgcggcattcccgccgaaaccatccgcgaattcgcccgttactacgcatccatgaagcctgttcacctacagcagatgtacggcgtctcaaagcgcaacttaggcgattacgcagctgcggtggccatgctccttcaggccatgaccggaaacctctccattcccggcgggtgcgaaggcggcggcgcatctcttgtgacccagccccgcgtgttccccccggttcccgacaccggccagatcaagggcgatgtggtgaaccccatcacgaacaacaacaacaaagtcaccgagatcatgcactgccagaagctctacgccgccggtgagataaccgaagaggagtttcgccggcgcatcggctgcccgaagggaagtccgctgcccaacctgaagatggccatcatccccaataactacatcaacaaccaacacgacgtttcaaaacgtatggccggcttcgccgacatggaattctcctggggctggcaatactatcccgatcagccgtcgatcgagtttttagacatcgtgcttccctccccgatcatccagttcgaatctaccgacatgcacttcttcggcatcaaccgctactggggtgcacccgccggcatgcagaactacttcttgttcgcaggcaagggcgtcaatcctcccggggagatccgttcaaaagactgggtatggatggaactggcgcgtcgcctcggtttcgcagacaagtactgcccgaagatgctcgacgtgaccgactggcgcgactgggacgaccaggttatcgaacgcatctacaagcccgcttacgaggaatgggccaaagacgaaaccggcatgctggagtacagcggggtcacgccgccctcgtgggaggaattccagaagatgcccatcatccgtgttcccggcgagccgggagaatggttccaccccttcaagaacaccataccgtggggcaggtctcccttcaaaacaccgtcgggcaagatcgagttcgagagctcgtatgtgaagaacaccgatctgacccaaacccgctatggcgggaagatggacgcctatccccgttggcaacccacctaccaagatcttcctgcaaacgatagctactaccatccgtggacgaagaattacccgctgtcgatggtcaccccggtttccacataccgccagcactcatccaacgaccgcaatccctggcttaagggcgattgctacgatcatatggtccgcatgtcgccggcagacgcagcagaccgcggtatcaagacgggcgaccgcgtcttagtgtacaaccaatacggcgaagtggagatcaccgcatacgtatcttccaaactgcttcccggcacggtatccatcggccatggcgagtggtccaggttcgataacgttcgcaaatccaaactcatgccctacggcatcgatacagccggcaactgcaacctcctcataggagacacgcatctgccccacgtcgtgggcgcgctgctaacggctggccttgtggaaatcaggaaggtaggcgatgaataatgacgcagtacggtttttacttcgaccaaggcagatgctacggctgcaaagcctgctcggttgcatgcaaggactggaacgacatcggacccgggccggaaaaatggatgagcgtgtacatgtgggagaagggaaaattcccgaacacctccatcggcatcctggcgtttaactgcggccactgcgataacgcggtatgcgtctcagcctgcaatcacggcgccgtcttcaaagaagaaaaatacggcgccgtactggtggatcaggatctctgcgttggcgaccgcaactgcttcgaagcgtgcccctacggcgctccgaagttcgccagcgatgaacccggcaccaaaatgagcaagtgcaccatgtgcatcgatcgcctggaaaaagggcaactgcccgcctgcgtggcggcctgccccatgcgcgccctggacttcggccccatcgacgagctggttgaaaagtacggagatgtccgccaaatcgaaacgatgccgtctcccgacatcacaacgcccaactgggtggcgaaaccgaacccgcccaaggagcagctgattccctacgatgtagaaaaagccatcaagctcaccaagccgcgcacgaagaccgacgacgtatattccgacatcaaaaacctcacggaattcgatagcgacgttatctgcacgaccgaactgcgcatgaagaacgccaccgtcgccgaggtgatggccgccacgtcaagcgaccaaggctagaagcgagagcctcgcatatgcaaaaaaaagggggggggtgcgacctcacctgagctgaaccccgatagcgggactggaaacaaaagttttcagtcccgcttagtttacaggggtgatgggagtgcgctaccgcctgcaccgtgcttcatcggcccccatcccctgtcttcgtaccgcattgcccacaaacgattcgatttcgcattccgcataaggacgagaacctcttcagagacgattgcgaccatccgatgttcgagggcggcatacagctgcaagatatggcttaccttcgcaaggatgcctgatcgccgaatatgggaatgcgcaagacgactcgtgcgccgagaatacggcccgactcctcgactctgttggaaagctcgatcatgccgccatgcgcgataaccgcatcggatgccgcagataaaccgatgccgtagtgctcgcccatcagcgcgccggtgcgggacgaatctccgcaaaagaaccgctcgcagccgtgctcgagcgcatcaggagaaaacccgggtccgtcgtcgtcgaccctcaccgtaaaaaatcctccttcggcatcgtacccgaaaacaagaccgatccgcccgcgcgcatgatcgacggcattcgccacaacgttcgcgacagcccggccaagcgcatcccgatcagcctgcaaccgcattcccgcaagcgacgatccgcgatcgacttcaagcgcaacgcccgccgcgcgggcaagggcgcgtgcctcccgctcgagttcgcaggcgaactcgtcgagccgaacgaacgcacaggccctgattgccgcttcgccgtgcgacgcttcgatgagcaggcgcacgtagtcgtcaagccgcttcgcggccgctgcggcatcgcgcgcagcggctgagatgtcttcggatccacccgcatcagctgcgcgtttcaaggcagacatgccttctatttcctctgcaacgtagtcggcattggcccgcaccacggtaaggggcgttttgaggtcgtgggcaagcgcagccacctggttgcgctgagcctgttctgcgcgccaatgcgcctcaagcgactcttcgagcgaagaacgcatgcgctccatcgcctcgagcacatcgtttatctgacgcacgttgctcgaacccaccgtaaacgcaaggtcttcttgcgcaatcctgtcggcagcatccgtgagcggcgccattttgcgtgcgatagtgcggcttgcgcgatgcgagatgagcaggacagaagcgatgcttcctgcgcacgcggcgaccagcataaggttttggggattaggcagggtatcgcgaaacgtgcgggagacgaactggggcatgaactcgcttgcaagcaggcaaaccgtggaatcggaaagttcgaataccgtataggtgactccgttttggccgatcaccgcggcagaccccctctcgatttcgccgcgatcgccctcaaggctgctgcgcgcgacgtccagagcggattccagttcgtcggcaggcaaatcgctctcgagcaccgcgccagcatcgtccagacgcacgtagcggtaggcggtggggatcgattcgggatcgaaatcccgctcggaacggagcgcctcgaccgtctcgtcgacatgccccgctccgtaactggcaggatacacagcacctgcgttcatcgctgcggatagcgcaagaaacgacaggacccatacgatgccgacggccacgatgacgtaggcaaagtagcgcacgatgacgagagaaagggggatgccccgccgaaaaggccttaaagctgccatttgtaccccattccccaaacggttgcgatgggatcggcacccgcatgaccgagcttcttgcgcgcgcgactcacatgcatggatatagcggcggcatccgcatcgctatcccagccaagggcggcttgccgaatctgctctcgggaaagcacctgcccacgtcggcgagcgaggacttcgcagatctcgtattcggtgggcgtgagcggcacgggcgtatcgcccaccgcgatctccttggtaccgagattcactcgcacggacccgagaagcagggtatgcgtgcgctcgcgctgttctcgtctgaggtgcgcgtccaccttcgcccgcaattcggcagcaccgaacggcttgcgcacgtaatcatcggcgcccagcccatagcctacaacggcatcttcctccgccaccttggcagtcagaaaaatgatcggtccgtcgaagcatggtcggatccgcctcacaagatcgaacccgtcgagctcgggcatcatcacgtcgcacaggataagatcgaatcgcgcaagatccatatcgggcacgcgcgccgattcgacggcgcatacgacatcgtgcccgtcgcgcttgagcacgcgcgcaagcgcagaaaggatcgcctgctcatcgtcaatcgccaatatgcacgccatcgcgcctcccgtctttcctcgttccgctttcgccatgatacccgatgtttctaacgattcgataacggctggctgcggcttttccgcccggcatcgtccagacggcaccgcggtctcagtcggcatccccccgcaacgccgtcaaggctccttcgggcacatccgcttcggttacctcgcggtagtgaacgcctgttcctcccttggcatcgatctcgagaaacccttctcctttcgccttgcgaccgaaggagatgatcgtaatctcgcgatggtcgcctcccccggttgcagcatccaccttgtaaacgtaattggtacccgcacccgtcgcatcgctgtaactgtccacataggaatcgggatgcggcaccggtgcccacatcgtaaccacaggaccaggcacgagccgatcgagaaccgactgggcaaccgcgccccaaccgcccgagcagtttggaagcaacgcaaccgccgcaacgatcgccgccgcaaggacaagaagcagaaccgacgcccgatgcgaacgtttttcagaactgcgcatggctttttccctcctcgaatcgtccgaaccacgcaagaagcgccgtcaaagccgccagcgtcgcagctgcgcacaggattcccgtcgtcgctgcggcatcggccacttgcaggaaaatcgccgccgatccctgcgcttcggctattgcagcctccactgcaagagaccccaaacgcgccggccaggcaaacggctcaaggccgagcagacccgaacccaccgccgtaagctcgccggtcatgaggccatgcgcaaggccccccaccgaaaagaacgcgaggaggagtcccgccgcccccgtgccgatggcggcattgcgcccgaagcgaagcgagagcgctatcataagcgcgtaaagaggcgcgcttccgaaagagaggcccgcaaccgaaagggcaagcgttcctccatccagcgcaagccgacccgccgcagccagaagcgcagcgaaaaccccgacagcgagagcgagggcggcaagccccataagccaaagcgccgtgcactgcgcggcaagagcgatgcggcgagacggcaccgccgcaagattggcaagaccgcccgcacgccgttcctcatccaccgcgagcccgcagacgacgcccgccataaggggcatcatcgcaccaaggaattgcacgtaggcatccgcccccgcagaggcgtcccatggcgctacggcgaagtacagcccgcaggcaaagccccccgcaagcgcgcagacaagatgcgcgggcgcaagcggcgagcgcacaagacgcgtaaactcggaacggatggcgccggaaaaagtcatgcgccgcctcatagctcctccgatcgcttgagccatgccgcccccgcagcgcaaaggacggcgaacaccgcagcggcaaccgcaagtccgatccatgtgagcgcgccagacgacgcaagcgcaccgccgagcaccgtatcggccgagaggggttcgccgctcggcagcaccggcagaaacgccgtgggtatcaccatagtcgcagacggcggaaagagctgcgggaccggcatcgcggaccaggcgaacccgccgacaagctgtaccgccaacggagcaaagatgcctgcgagcatgccgaatcgagccgtgaggaaaagcgccgcagggatcatccatgcactcgttaccgttaccgcgagagccgccgcaagcatcgtgagcgctgccgcgaacaacatgtccgcatcagggcctcccccgccgaaaaccgatgcgaaaagatagatcgcgaaaacgacgaggttggagagaagcgaaagaccgaagcagtagaggaccttagcccaccacgaaattccgagcggcgtgcccagacccaggatcggccgattcttaagacgcgcatcggcattcgccacgcaccccgcgacaagggcgatcgttacgggcataagcagagcgtaccagtaattccagggcgaaaacgaaagagcgccgccgaaacccgtcatagcccccaaaagcgcaaacggcagagccattacgatggccaagcgaacgggcgccgcgtggcggaacttgagcgcctcggcacgcaatgccgagaaaagcgtggtgcgagcctgcatttccatcatgccgccccctttgtccggcacacgtccatgaagagcttctcgagatcctcggcaggatgaagcacatcttcgtatgcaaggcgaccgtgcgtgatgatgccgatgcgatcggccatctgctgcacctcggaaaggatatggctcgagacgagcaccgttatgccctgcccgggaaatgcgcggatcatgtcgcgcagctcttcgatgccgataggatcaaggccgttggtgggctcgtccaagatgagaaggctcggatgagcgagtagcgcaagcgcgatgcccagccgctgcttcatgcccatggaaaagcgtcccgcgcgtttctttccggtaccttcgaggtctaccgtccgcagcacctcatcgatgcgctcgtccggaagtccaagcagcgtggtgcgaacccgaaggttctcgcgtgcggtgaggttggggtaaatcggcgcttcctcgataagcgagccgatggcgtaaagatcatcgcggcgccacggatgcccatcgaaggcgattgcgccttccgtggggcggagcattccgcagatcatcttgagcgtagtggacttgcccgccccgttggggcccaaaagcccgtacacttcgccctttcctatgtgcaggctcacgttctccacggccgtctgggcggcgtcgccgcggccgaagcgcttggtgagcccgtgcgtctcgagcatgcaatccaatgctgactcccttcgttcgcatccgccgaaaatcggatgtcttccagttgcgaatatcagcatgaacggcaagtttaacgaagccgtaacgaccgaaaggttttttgcgcaggggcgcgcagacgcaacgagatcgcaaggcgcaggggttgcaaagtgcaggggcagcaaggctgggcggcggtgacgggatgcaaagcggagaacgcaaggatggcgaagccgaaacgctttcgcgttgcaagagagcgaaaaacgaccgttgcgaggggcgtcgaaacccaacccgctgcgcactctgagagccgccgcgcacgctgcggcatcgcccccagccaatagatcttcgaagcgatccgccgcatctgctcgaataagcagaaccctttccgctatgatgaaggcaaaccgatgaataggtgctttcttatgcaatttaacgaaaacaagatccgaaaatactgcaaaaacaaaccgggcatgatgctcacccttgcaatgcacgaaaagggcactgacaccatcaagagctttgggaacaacggcatccccgttgcacccgaataccgcgcttacgaaatcggttccgtttcgaaagttgttctttcgaccctgcttgctaaatgcgttgaggaaaacatgctgagcctcagcgacaccatcgaccaatacatagatctgccccctgggattgtctacccgagccttctccagcttgcgacgcatacctcgggctacagcgaccccgcgcttttcgattctttcttcgaggcggtttcctggtcgctctcgtcgagtaaaaggcagttcaaccccttcgatgactttaaatccgactggatcgtcagtgcgatcatcgatacctctcgcaaacaaaaaaagggaaagggacggttccgatattcgaacttcggatattcggtattaggccatacactcggcaaggcgttgggcggttcctaccgcgattgcatcacctcttttatcgaaaacgatctagggctttcggcaacttcttgcaactcgggaaaaatggaaatggtccatggtttcaagaaaggcaacgactacggaaactgggagtggtctgaagactcggcatacgcccctgcgggctgcatctgttcaaatgcagccgacatgattgcttttgcgaaaatgaacctttacgacgaaagaagctatctgacctttagccaccggaagcaacactccgataggctcctcgatatcggtcttggttgggtaatcgaaaaggacgatgacatcgtttggcacaacggcaggacaggcctgttccatacctttctcgcattcagcaaaagcaagaaacgggcgattgccctgctctctaattgcgtcaatggcttgagcatgcccgaggacaagctcgccctttcgatcctgaagagcgattaactcaggtacgccaacagggcacgatacgcctccgcatgtttcgattcgcacgatcatcttccccgcatcgctgttccattcttccccaatagtgctataattgccacattatgatacatatatatcactaaggagaatcggatggaatggaagaagctgtattggcttatggggtttctcggattcctcgggtttttgggcattacaggggagcctgtcttctttctttcgttcgccttcttcggaaacttcgcatactactggtggaacaaactcggcgatgccgacgaaaggctctaccgcaataagtacttcgcagcccaaacggtctttcagtggactttgacgggcattttcactctgagcctcttcttcggcttcgtatccaccgacgttgcgtttctgtatcgcgcggagctgctgatcatcgccttcgggtttgcgggcgcgatgaacgcatgggctttctacacctatcgcttggatcgaatcggtgggtgaaatgacacggttcaaaagccacgtacgccagtatcggcaattcaaggggttgacccaagaaaacctggcgaaaaaagtaggcgtcagaagagaaaccatcatccgcctcgaaaacgcgaaatacaacccttctctcgagcttgcagctcgcatatcgtttgtgctggaagagccgttggatgtcctcttcgaattcgatttcgaataaccgaaggcggccggatgaaaaagatggctacccgcaatttcgcctgtagccatcgccccattcccgcatgctgtcgagaatgggtttgaggctgtagcccaaatcggtcagttcgtattcaacgcgaggcggcacttcgggaaacacggtgcgcgtgaggagcccgctctcctccatagcgcgcagattcgccgtaagcaccttctgcgtgatggcgccgacgctctttttaagctcgctgaacctgcgaggtccccccatgaggtcgcgcaggatgagaacccgccatcgattgctgatgagcgccagcgtggtttcgaccggacaagcgggaagggacggcttcgttgcatactcgtcgagcatcgaacgcctttcgtggttggtttcaaaatgaaggctagtattcatatgataccaatgaaggggaaaaggaggcaagatcgcatgtacgagagatttcccagaatgcctccacgaaagtatcgggatcgcacattcgcggccattcgcaagagcgggggctcgtgatccgcgaaagctcgcgcctgtaaagcccgctcggtttgcgctatcatcattttaccgggtacaggcgcgcaattcgcagcaaaggacgcgacagcatgtgcaagcacttcatcatggttccacgcaacgaagtcgaactgatcattcgcgatatcgagatcgacaaccatgtcaacatcatgccggattggcccgcacgcggcgccgatgcctatccgcaatcgatcgtgccgctcatcgtctccgaaagcagcggccttgccgttgcggaaaagacatggggttatgccgtcccctggaaaaagggcgtcgtgttcaacacccgttcggaaaccgcgctcggcgaaaaaggcgccttgtggcgcgattccctcctgaaccgccgctgcgtcataccagccttcggtttcttcgaatcgcatagaaccgaaatgtctttcagcgaacgcacaggcaagccgatcaagcggcagtatcgtttcgacggaccgcgcagcctgctgtttatggcaggcatctaccaaaacgaccgcttttcgctcatgactaccgcgccgaacgctgcagtcgagccagtgcacgatcgcatgccggttgtcttgctcgaacacgaattgggcttgtggttctcacccgatttccaggttttattcgatcgcacgggaatagagctcatcgccacctcccggggaatcgaagcaagcggcgcaaccgatgcgaaagccgagcaatccgcccgcagcgcttctcaaaacaccatcctcggccaaagcccgctttgggaggacggagaatgctcttccgacacagcctgaaaaacctcttgcattcctccttgctcatctatagtatacataccattggtatgtatatggatcgagcgagaggagaatgcgcatggcccgcaacaagcaccccgaagagaccgtagcgaaaatcctcgacgtcgcactcgagctgttcttcaccaagggttacgacaacacgagcatccaagatatcatcgacaatcttggcggcctgacgaaaggcgcggtttaccaccactttcgctcgaaggatgaaattctctcggcagccctcgatcgtgaaaaccagaacctctaccgcgaactcaagctcatacgcgacgatggtcgcatgacgggcgccgaaaagctgcaagcgctcttccaggcatcggtcaacggaccccaacttgaaatctggtcgcacatcgcgccttcaaccgatccggtgaagaattcgcgcctgctcggcctgcaataccgatcggttttcgaggagaccgccccttgctacgttcgccccatcgtcgaacagggcgttcgcgacggctccatcaaaaccgatcatccgaaggaattctccgaagtgctcgtgctgctggccaacctttgggcaagcccgatgtttcgcatggcaacgcccgaggaactgcaaacccgcatctcctactacctcgaaatagcccgagtgctcggagtcgagctggccaccgatggcatcgaagagccccttgagcgatatcgcaacacgttcaacgagaatacggagatcttcgaatcagaggatgcctcatgatcgcccgaaagcccgccccgcctcggcaggctgcctgggcaacaggcgacccgccgccatagcccgcgccccgccgccaaacctcgacttgccgcccgctgctccgcagcattctttttacctactatacataccaaccgtatgtatgtttaacaggaaaggacatcatgaacgaaaaaccctgcatcccatctcgcctgttcacccctcccttcgccgcagtcgcttcggcacagctcttctcgttgctcggcgaagcgatactcaagttcgtgctccccctctacctgctgaacctttcgggttcggcaaccttgtacggaatcgtcgtggcctgcgcattcgttccttacatcttcctcacgcccatcggaggcgtactcgccgatcgcgtgaacaagaaactcgtcatggcggccctcgacctcgtcatggcggccgcttcgatcgcatacctcgcgttggtgcaaacagccgacctcgtcgttctgaccatcgtcatactcatggtcctctatgccgcccaaagcatctaccagccaacggtccagtcgtcggtcccctccgtcgtatcccacgaccgaatcacatccgccaccgcgatcgtcacgcagatcagcgcgctcaccggtcttgtaggccctgtattcggcggtttggtgttcgggtttttcggcgttgcgcccatcgttgccgtatcagcaggggcctttctcgcctcttctctcctcatcatcgtcttcgtcaagattccctccgctaggcatgaatcgagcggcagtccgctaaccatcctcaaaggcgacatcaaagaagcggtttccttcctcaagctaaacccccttatgtggaagacgatcctgctcgccaccgtcatcaatctggtggcgtcggcattcatcatcgtgggcaccccttacatagtcaccgaggtgctggggctccccaaccagctgatggggttcgccgaggcggcgctcgcgctcggcggtcttgcgggcggcgtcgtcatatcgctcaagcccgctctcttccccattcggaaagcgcctcgattcctgttcggagcagccctcggcttcatccccattgccatcgttacggcatccgccctcgcaccggcggcggtttacggaatcctgctcgtcagcctttcatggaccatggcgatgtgctcgatgttcccgatcataggcatatcgtttttgcagatggagacgccgtcagaccttgtcggcaaggtgatcgccctcaccatgtcggcagcgaactgcgctatgcccgcagggcagctgatattcggaataggattcgactcggttcccgccccggcgcttgcgctcggagttgcactcgtcatgctcggcgttgccgcctttgccgcgaagaccttcaaaaacgaactcggaaatctgcctgccgcattgtgcgagaaggctgcaagcgaacaagacgaacccgcacatcacagcaccctcccgaatccgctcgcatgaggtcgcgttcgctgcggcgacgcagtcgcccgacagcgcgtcgcagccctatacgttccctaaataaacgtgcgcaagatagcgcttggcgatcgactggaaaagaccgagaacagcaggcggggtcggctgcgcaccaatcattctataagctggaaagaacctcgaaatatgcaggggcgtcgacggatcgagagaggcgatccatgcgcattcccgttcgaaaagctcctcgtcgtcagaaaagccgggaaccaccagcgtcgtcacctccacatgcacgcccgcctccagcgccgtttcgatcgagcgcttgacaacggccaaaccgccaggcgctccaagcaaacggtatccctcttcggaaaagcacttgagatcgatgttgagggcatcgagatgagggagcgcctcatcccagacgggtttcgcaacatagccgttggtgaccgccgccgatgcaagcccttcgccgcgcgcacgccgtgccgcatccatcaggtattcgggagcaatgaacggctcgttgtaggtaaacacaacgccgatgtttccctgtgcgcgcaattcgatcgcccgctcgatcaggttttcgggtgacatgaaataagccggaagagaacccgctgcgtccaccatggatatatcgctgttctggcagaacgaacaacggaggttgcacccgtagcttccgtacgacaggatcatcgaaccgggatgaaaccgtgcaaacggctttttctcaacgggatcgagcgcaagcgaagtcgcctgcccgtagctcaaactcgcaacctttccgctgcgaacggttcgtgcgccgcatatgccgaaagacccttcatgcaatcggcacccatgcggacaaaccccgcacgcaagcatgctaccgcccgctgcgcccgatgagctacccatggcgagcgacctcgaagcgctctattccgatgccgtcgaaacctccgcgccaatcgatccccgccttcatgcaagctattcgcagctgctcctcaaccgtatcgactccctcgagatcgggaagcagaagaccccgcttgaagccctgggtcacgatgacgccgaatcgcttcgcatcgagatccgcgatccgagcgggttcgggagggaacaaaacgtccacgctcacatccaaatcggcaagctctgcaggggttatcgccggaaaccgcgggtcctgcgttgaagccgccaccgcatttgcgatcacctcctgagccaatgcagcccgcacgggctcgatcgttccaatgcagccgcgcaactctttggtactcgccacgtgaatcgaaacgaagcaccccgcgcgtcggggcaagtcgtcgggcaaggcaggggcttcgggagtcgctccctcgcgcacgtatcgctcgatcgtcaggcgagcgagcgctgcaagggggtcgtcgccacaggatccatcgatcgattcgccagacgaaacgccgccgacgccgccttcacatgccggcgaatcggcagcctgggcatcctcatcggcgccgtcctcatccgccatcgccttggcagccgaaacttcttcgcgcgagcgatcagcctcctcgcgctcgaacgccgccacgccgtacccaacgccgaacgggccctcgtacgagagaagctccgaagaccaaggctcgccgctctcccgctccgcttcggcaagggctcccgcaagcatgatgaaacccgaaagcccgcactcggcggcatcttcgcacatgacgggatcgagctcggcgaacgcaaggggatcgcccgattcgaccacccgcgcaaaaccctcgtcgaaaagagggcccgccggttcgaaaccgtagggaccgtcggctttgagcttatgggatagatcgccgctgacgagaagcacggtcttacgctcgatcctggctgcagcctcggccaaacacgcaccgaacgcgagcagcttttcacggtggacgcccgacccgccgatcgacaccgcccgatacttatcggaaggatagcgctgttcgatgtagtacaggggcacgagcatcccgtggtcgagctcacgtgccgcatcggacacgcatccaaccggcaatcccctttcggctgccagatcctctatcgcgcagcgaagctcctcgtcgaacgaaagatctgccgctacctgcggcgcgccgaactgcgcaagcgatcccgaagccgcgcttccagccccgagatatatccaatccccgtagtaggcgctgtgaggactcacgatcaggatggtttccggcgcatgggccgcgatccggcgggcgacctcgcaataccccgaaagcgtatcggcgattcgggtctcctccccccttcccacctcgggaacggcaagcggcggatgcgggacgatgtatgcggcaacaagcgacatagcggcctcctgtcttaatcgatgccgcgattgtaccgcggttcgacagacggcagaaacccctaagaaggaattgaaaacgatttggcaggaagcagtgcaaaagcgaccatgcgctgtcggccgccgtgcgggagcagtaaccgacaggaagcccgtcgcgcgcgcctctcggcgctgctatgcagtttcgatccgctccacaatgtagcacttgtgaattctgggattgcggacgaagtcctcgggaatcgtctcggtcgtgatatcggtaagccgcacgccgtaacgttcgagcgcctccgtatcgggcttgaacgagcgcaggttgcacgagaatatcgcgcgaccgccccttgcaagcaaccgcgaaaccccgatcagcagctcaacatgatcgcgctgcaccgaccaggtgtccttccccatggctttcgaattcgagaacgtcggcggatcgacgaaaacaaggtcgtatcgccgcttgctcgcacgctcctccgatatccaacgcaccacatccgaacggacgaaaacatggttgcgaccggaaaaaccgttgagcttcatgtttcgctcagcccaggaaagataggtttgggacagatcgaccgttaccgtgcttgccgcgcggccgcccgccgcatggaccgtcgcggtgcccgtataggcgaacaggttgagaaaacgagccccttcggccatcgatcccacgagctcgcgcgtctttcggtggtcgaggaatatgccggtatcgagatagcctcccagatcgatctcgaacgtataccctgattctccagtccatgcaacatgcgatcgaccgcgggcatcccggtattggccgccgcccttatcgcgtctgcgcgtcttggaaaacacatgagacgcttcgacatccagtactgaaggaacgagggcgagcacgtcgcgatagcgccgctgggcgcgctcggcatccacggaagacggcgcctcgtactctgaaatgtgcacgaaccgctcgcccgccgaacggcctgctccctcgtacaagtcgatcgccatcgcatagtcgggcagatcggcgtcgtagagccgataacaggaaacgccgttttttcgagcccatttcatccgctctttcgccaccttgcggaatcgggaaacgaactgatcgctgttcttctccgcaaccgcaaccgagcgctcggcacccgaaagcgatatcagggaaagctcgatgcgatcgggggaagccacatcgtaaaggcgaaggtcggcctcgatggggccgttgtaaagggagagcgtttcaaagggtacgagtcccagagccgcgtcgattgcggcatcgggcgtaatgacggcaagcttccatccctcaggcaaaaggccgatcccctctgcgagcgcggcgtaaacggcaggaagctgcgcctccgaggaaagcctctcgccgtagggcgggttcacagctacgagaccaagaccgctttcagatgaaccgccgcctccgggggttttgtcctgggcgcttcgaatccccaagcgagaccctgcaggggcgttcagcgcatcacccagccgcgcagcgtccgcaacctcgaatacgatctcatcggcaaaccccgcgcgcttcgcgttttcccgggcgatcgcaatgacggattcatcgagatcagtacccacaatgcgcggcatgccgtcaagcccgatcgccagccgctcatcggcttcgtcaaccagatcgccccacaccgcctcatcatgctgcgcccaacccctaaaaccccagtagtcgcgcatgatgcccggtgccctgtcggcggcgatcatcgccgcctcgatgacgagcgtaccagaaccgcacatgggatcggcgaacgaagcaccctgtcgggccatgcggcgccagccagccgcaagcacgatgcccgccgccagcgtctccttgagcggagcatcggtttgaacgccttcttttcggtatccgcgacgatgcagcggctctcccgaaagatcgagcgagatggtcgccttggcgtttcgcacggcaacgtcgatcgccacatcggggcgcttcggctgcacatcggggcgcgttcctcgcgcctcgcgaaggcgatcgcatatggcgtctttcaccttcactgcggtgaactgcgtattgcgcaaagcatcgttcatgccgtgcgcgtatacggcgatcgatgcgccctcgacgatatgctcctgccagtcgatgcgcttcacgcccgcataaagcgcatcggcgtcgtgcgcttcgatacgggcgagcaccagcagaatgcgcgatgcgacgcgcgaccacaggcatgcgcgatacgcatcggcaatcgagccgaaaaacgcaacgccccctttgaggggacgtacgcgctgagctttgagacttttcaattcggttgcaagcagctgttcgaggccgctcgcgcaccgtgcgtaaaactcgtaggtttccacgtatccgcgctagtcttccagatagtctttcaatttggaagagcgggagggatggcgcagctttgccagcgtcttactctcgatctggcggatgcgctcgcgggtaacgccgaattcgcggcccacttcctcgagcgtgcgcgggtggccgtcttccaggccgaaacgaaggctgatgaccttgcgctcgcgctccgccaacccgtcgagcactttcgagagctgctcctgcagcatcgagaagctggcggcatcgggaggcaccaccgcagcgtcgtcttcaatgaaatcgccgagctggctatcctcttcttcaccgatgggcgtctcgagggatacgggctcctgcgatatcttttggatttcgcgaacgcgctcggcgggaagacccatctccttgccgatttcctcgggggtaggctcgcgtccgagttcctgaaggagctggcgctggatgcgcacgagcttgttgatggtttccaccatatgcacagggatgcggatcgtgcgagcttgatcggcgatcgcacgcgtaatggcctggcgaatccaccaggtcgcatacgtggagaatttgaagcccttcgtatagtcgaacttctcgactgcacggataaggccgaggttgccttcctggatgagatcgaggaacagcatgccgcgaccgacgtagcgcttcgcgatggaaacgacgaggcgaaggttcgcttcaacgatctgctgcttggcatcgagaccaacctgctcgatgcgggtcaggcggcggcgttcgcggcgttcgagctcgatgccttcctcttcggctcgctcgagctgttcggtcgcctcgatgccggcttccatcttcatggcaagatcgatttcctcggcggcggtcagaagcggcactttgccgatctccttgaggtacatgcgcaccgggtcgcccgtaagcatggtgaccgacgtatcggttgagcgcttgcgcgatttgaccttgctcttcgagccgactttgggaagctgcacttccaccgtcgccttgagttcttcctcgggaatatcctcaagaagctcttcgtcgttgaaattcgtatcgatcttatcgtcatcgagggaatcggtgacagcggaatcgtcgatgaccggatcgctatccggttcgacgtccatatcgtcgtcttcgatcatgtcttcttcgatttcgttgttctcgctgatggagtcatttgcagaggagatgttcttagaggctggagccacgtagtcttcctttccgatcaacgtgttgcccaggctggaaagcctgtttttgggcgcaaagattcagcaaattaatataccataaaattcgtccgagcagaagagcgattcttgtttgtcaagaagcttgcttggaaggcttttgcacccatccatgttctcgatttcctgaatcctgtcacaaaattggacctgtggcaattatgcaattcattactttattgtttctgaaatgattatcaacaaaatgcctgatggcgaaaatatcatacagctcattatcgttagtcagtatattacattttgccacaggtccatttttgagccaaaatcggcagaattcggaacacagcaagcgcaaacgcggccaaggccaaaagacaagcggccgaccgcatgaagtctgacagccccgcaagcggcgcagaataaaacaaagtgtaatcctccccgccgccattcagctgcggggaggattgagccttctacgttcaatatcggtgatcggatgaagaagccgggctatttcccgggtaccggaggaacgaatggcttctttttcggttcgctcgattgcaccttcaaagtcggcacgcatgactggactttggctccaggggcatcgcccatgaaatccgcgctgcttcctgcgctgggttccgatccaacagagcctggcgcagaagatccccttgcggcggcgggagcactcggaacgacaacggatcccggaacgctagctgctccaggcgcacctggggcggcgggaatcccgggtgctcccggcgcactgggcgctcccggggcggcgggtgcacccggagctcctaccggcgaattctcatccatttgagcggtgggcggtctaaaacacatggtctactcctttttttccgataatgtcacttcatgcgcagtgacggcgcattgtcgatttccagaacccgcaatccaggcaaaacgaacagcccgaatcggcggaatcgtaaccacacgaaccgaaacgcatcttcctcactcgccgagacgggcacgttttctcgaaacaaccgacgcaacaagcaccattgcgcatatcgcagtcaacgctcccgacgacacggcaatcagatcggcaccgtagccaatgccgagcagggcaacgcaccacgcgccgataacaggattgaagaaattaccgaacccctgcagcgccccggcgatagcgatggccatcgcctgcgacgcgggcttgcatagctccgtaatgcgtatgcagtaggcaggccatacgatgccgacgcccacgcctgcaaccaccatgcccgcatagacgcccgtcaaggagtcgccattcgacacgacgaagaaacccaacgccatgaggccccacgaaaagggaatcacgaagtagccgagccgatgcttgagccagccgtagaaaaacgctccgaacgcggcgccgatcatttggatcgacaaggcgaaccccgtatcggcagctgttccgatacctgccccctccacgaacaaagacagattggaggtgacgagagtggcgagcatattgccgacgaagtatacggcgatctcgatccacgcaagccacttgacacccgtcatgactgccgacatggtcggtttttcgcccttgtcgtctttcaccatggggatgcggggaagcaacgcaagcaccaaaaccagcgagatcagaccaacgccgtaaccgagaaagcttagatgccagtccttgacggcgaactgccctccgacaaagatcatgatcgtgcagccaaccgcgcctacggtcatgttccatcccatcatattttcccgcaagcggcctttgtacaatcgcgggatgatcgagtcgcatgcgggaagcgtcaagcccgctcccattccgagaacgattcgacaggcgagaataccgtaaaacgacgtgagcagcatcggaagcattcccccgacgacgaacagcacaaggcccgcgataaccaacgtgcgcggattgatccttaccgaaagccacccgtagaagatggccaccacgcaacacgcaatgctcggcagagtcaccaacaactgcaccgtcgaaacgggtatctcgggatacgttgcgcaaatcgaggctatcgctggagaaatgcatgcggaggcagagtcctgcaacccgatagccaaaacgggaatcgcgagtacgtacggattcatttctgagaagtcttttttcactattcccccaatagatttatgcgtgcgagcagagcggtgaaacccgtcgaagccaaatctcgtcgcccgcattcgcatcgccgatcccaagtcggaaccaagatcgacgatgcgcaataaaatatccctactttagtaagttccagccgactgcgctaagccgcaggagaatcgtccctgttcttcagaacgtacttgcgctggtacagagccgcgccgagcgcacatagagccgccagcaccgcaaatccgacgacgagaaaatcgcaggccgtccatacgccgccggcatcctcgacgagctttgccggaaggaacgtggagagggcgccgcccacgttcgcaccgatcataaccaagcccaaacccatcgacagaaactcagggcgcttcatggcgtcgggcgccatcgcaaacccgataggcatgttgaattgagtgacggccgaaaggacaaccgcaaacgccgtcacgatcataaaggaagaaggtatcctgaactgcagggcgaacgcaacggcgctgataacggctacaacgacaagcaggatacccctgttgcgaatggccgtcttgttgataacccagcccacaagcagagatccgaccataccaccgaacgtcgagatggagatgatgttgttagcagtagcgggatcgaaaccgagaccagtctgcaggaaggtgggatacaggcccgtatagcaaccgcaaccaacagccagcaggccaagcgcaagggacatgagggcgacggcgggctccttcaagccttcgagaacagacggcttcttgccgctggaagcaggctcaggctcggccaccttgggttcttgcacgaacaggatgaataaaaccaacatgacggcctgcatgacggcagcagcaatccactctccctgccagccgaacgacggaacgagcatgttcgccaattgagcaacgagcaggttagcgagcgaaacccagataacccagatcccgtttggcaaaccgcgcttgtcggcagtgtagttcgctgtgatgatggcaacgctgaccatggtcatgcagccgtaggaaatgccttcgaggaaacgcgtggcgagaaggatctcgaacgtcggcgcgaaagccccgatcacattttccacgatgccggcggcgacaacgatgatgccgaattttttcgcgccgatcttctgcatgatggcgccggcgggaattgcggtgaaaatgcacgtgaggccgacaacggacataagcaatcctacttggctcatctccacaccgtagaaattcatgatgttgggcatgttgaccggcaccttgaacatgccaaaggcaatagtaacgcccgtcagaaacacgataaagaactgcaaccagcttttcccgctgttaagcgtaatggattttgtgctcatttctcccctttcgagagcatagtcaaattcccgttattccttttcaagtggaaaatccccaatgttgagactctcgacgagttcgacggttctccccttcacgcccgcaaaaccaggcgcctcgatgtcgagcgtataaacacctggcgtcagatgcttgaaccaaaaatcgccgaagccgtctgtcgcggtctcacgaacgccgccctgcgcatcggtcagtttgacggaagcgccctcgataacgagatcggcttgcacatcccacacctcgccggaaacgaacaggccgaacgggtttacgtaataaacgcggggcttagtgccttcgacatcccactggtccgtggattgcgcgatgagatctgcgagctcctcttcttcgccgaacagcagggctcccgttgcgcaggcatcgacgcaatgaggaagtttgccttcgtcgaccaagtgcgcgcaacctgtgcatttctgcggcacggacagctcttcgttccaatagatggcaccgtaagggcatgcgtcgacaagctcttttttatcctgcgccttttccggatcgatgatcaccaaaccgtcttcgcgcttgtacaccgcctcgggagccgctttcatgcagggagcatcatcgcagtgacggcacagggtgggtcggtattcggcaagaaccttcggcacctgcccatggatcttctcggtcatcttgagccagaagtggcccgtattcggctgcggcttcgaataaggcatccattcgttttcaaccgtctcgtctttgcaggcaatctgacagccgtagcagccgttgcatttagccaaatcaacaacaaacgtcttcatgcttacgcctcctcaatccagcttgcaatcgctacgccctcatccgggtcatacggacggttaaacgtttccggatactgtcgagccaggtcgaacacgtcaatcttctctatgtcgacgagaaatccgctcgtcacttcgccgggagcgttttgcgacgtggttttggtcggtgcgataaggttgttcgctccgccgcggtcggaaacccccgactcgatcggatcgaggcgagccccgtgatcctggtatacaaccgattcccgaatgcgctcggtaacgtaagccccgccgagaacccagccgcgatcattcaaaattttgacgatgtcgccgctcttgataccgcgcttttcggcatctcgcggattgatccataccggttcgtacttgtagccgtcgggtcccgtcaccttgcacgtgggtatttcgcggaaccacggaatatcgtccatgttcgcgtgaatgcgccagcgagggtggttcgaaacgatcaaaaacggatacgtatcggaacgagaatgcagtaaactctcctgatgacgcttgccgtacgggatgaaatggggtaccggcgggcgctcgtcgtcatcgggaaagtgctcggctaacgcggttgcgtagaactcgaccttaccggttggcgtagaaagaggatgcgcctcggggtcttcgcagaacgggccgaagccgcgtggcaggtcctcccaatcgtcgagcgtcggcgcaatgaagtatcccttgtccttgaactcttcgaacgatatgtcgcctggcttctcggcgccatcgaagccgaccctgatccagtcctcgacgctttttccttctacgaactcatcgtagacgcccagcttcttggcaacctctccaacggcctcccagtcgctcttcgattcgccaagcggttcgaccgccctctcctcgtaatagatgagaccgaacggcgcagcgccgttatcctgtccgatgtcttcctcttcgtatttggtgttgatcggaagcaggatatcggcgaacagacagtcgttctccatccagatatgctgagcgacgacacattctattttcgggctgcgaatcgcctcgatcatggagtttccaccgttccagcacgtggtccaacacggcgtatccgtccagatcatatggatgccctgagcgccggggataggatactggtatgtggtgtactgatcttcccgaggccatccggcaaccgtatagccctgccacgtcaacggattgtcgggagtgtagtcgcccatgatcgccttcggaacgagcgtcttgggaataaacgacttggtttgcacgaaatcccatccgcgataggcggccccgacggtcatgttgctcgaatagcagggagcaggttgctgggatggaagaccgtacatataccattcgatgaacttgaccacgttgcggcccggctttccaagaccctgcatggtcatgagggcaacctcgaagcgcgccggttcatgagaatagcaggagcggatgaacgaaccgccgttgccgtgcgccatgcttgtgcgcttcttggcccattcatgggcgagagccttgatctggcgcgacggcacgccgcagatgggtgccgcccactccggcgttttaggctgcccgtcttcgttgccgaggatgtagtactcgaaccaatcgtagccgacggaatgggtgtcgacgtagtccttgtcgaacagcccttcggtcatccacacgtaggcgattgcggccataagggcagcatcggtgttgggcagcacgggaatccatttgtccgcgtgcaccgccgcaccgtaattcaagtcgggacacacgtatacctgcttgacgccgatttcggtcagccagaagcaatattggctcggaagctggccttgccaaccccatgtcgtggtttccatatcgcatccgcagaaaatgagcatatcggtgttttcggcaatgtcgagcaacaggttgcccatatcgaactgcccgagcggatcctggccccacatgtgcttggcgccccagtaccagccttcccagctatcgggctggcgggcctgataggtccaatcgtcgcccaaaacgttcatgagacgcgtggcgcacccgtgggatgcgtgaacgaccttcgtttctccatgaccgtctccttggatgaagatcgacggaagcccgtactcgtcgattatacggttgatctcgccggcgatgagatcggtggcctcgtcccacgtaatctgaacgaacttgctctttccccgattttcggtattgcgctcgccccgagggtcccaatccgcacgtttatacggatggagaatcctgttcttcgagtacacgcgcttcttgtaagcatatgcgtacggcggtagaagcgctttcatcgtcgaatggaactcgctgccccgcgccttgatggtccaaggcttcaggtactcttcggaatactctttgtcgtatcgcatgggacgaacgcggatgatcttgtcgtctttgacatcgacttcagcaacgtttgcaccgatgccgaatgaattcataccagtcgatttgtagaccgttttctctggcatgcgccaaacccccttttctctacctactcaactgttcagcaatcatcggggccggccgccttctccttacctcgagacccctctgctaacggataggttcttcattgaactcgtccaaacacaattgcatggtaagagcggtgcgcgaacttgggtagacgacttgtcttcatacgtcgtatgccaaaaacgcatagataatccgggctggtgaaaagccatttgcagacaaaaacaccacgacctcgcattaatgcgaggtcgattgaatccctgcgagcgccacagcggcgagcacgtgcgccggtagaccctagcgtgcctcgtcggacggcagagcgtcaaggaacaacgaaacgaactgatttttcagcgtctttttatgggcgaagaaaaccgggaggtagagaggcgattcgaagtcgactatctctacggttctcgatgcctcgaaaacatcgcacatgaaatcgggaataacgaaaaacccgtttagggaaacaacgaacgaggcggccacttcgacttcgtcaacttcgaatatgctcttcggcttatagccggcagtcgccacaagctcgttgagcacatcggtcgtttcctttatcttcaagcatacgagaaccgcatctgtcacatcggcgggaacgatatatcccctctgtgccaccggcccgcccttgggcacgattgcatgaaggacgtccttgccgatacagcgatacgatatctgccccttgtcgtcaaagcgagcctgtccaagaaatccgatatcgaggtctccgtcgataatgccatcgacgatgtcaagggggttttcggtagcataggaaatcgcaatgttcggatactgccggttgaatcgctcgacgacaggtgcgatatagcggtcgaaccccatcgagaggatccccatgcgcagctggccgcacaccacgttgttttccggctggaacaaacagacgatatcatcgtatcggctgactatgtctttgaacgtatgatatgcctgttttccgcggggcgtgagggtaagccctttgggcgatcgtaaaaacaactgcacgttcaatgtgtcttccatagcgcgaatgtgcttgctcaagaccggctgggtgatatgaagcttggatgcggcaaccgacacgcttccctcatcggcaacgaccagaaattctctcatgtattcaacatgcacgatgcgccccctcgcatatccgacacgacatgtctcgactgcgttgcattcggcgtgcaccgcgcacacccgtccagcatcgcagacgccatcattatagtacgatcgcgggcggcaaatcacgcagatccaccctctcgcaaagccgccgcttactcgtcttcgccgcgcaccttgaactcacgcaggatgtcgtagagctgctcggcatcgaaaggcttgggaacgaagccgtccatgccggcctcctttgtgctgtcacgatcctcttggaaggtattggcggtgatcgcgatgatggggaccgccttcgcatcgggacgatcgagttcgcgtatcgcccgcgcggccgcaagaccgtccatcacgggcatcttcacatccatgagcacgaagtcgaacccgccgggctcgcttgccgaaaacaggtcgacggcctgcttgccatcggccgcccgactgacgacgactccctccatctcaagcagcgcgatcgctatttccgcattgaggtcgttgtcttcggccagcagcagcgtcgacgccgcaagcgacacatcggcatggcctccgtcctcctggacgcacgtggcgcactcctgcgagataggcagatcgatggagaagtagaattccgatcctttgcccacttcgctgctcaccttcagcgcgccgcccatcatgcgaacgaggttgctgctgatcgcaagacccaatcccgtcccctgcacattggtgcggttctcggccgcctgctcgaacgactcgaacacgcgctcgatatcgtcgggcgcaatgccgatccccgtatcgcgcacgccgaagcggatgcgagccgcttctctgtcgcgcgcgacctccttgatcgtcaacgtcacggtgccgcccggatcggtgaacttgaacgcgttggatagaaggttcgcgagcacttgttgcaggcggatgtgatcgcccaccacgcacccgtcctccacattgcactccgtcaccatgacaaggcctttttcctcggcctgaatgcccaccatactctgcatctgatcggcgagcgcgcgcaccgcgaaaggagagcactcgagctgcatcttgttgttgtcgatcttggacatatcgagaatgtcgtttacgagggcaagcagaaactgcgccgacgtgttgatcttctcgaggctcgtcctgattgccggggtggcctcgcccgactgcgaagcgatggtcgaaagcccgatgatcgcgttcatgggcgtccgtatctcatgcgacatgcgcgagaggaaatccgatttcgcccgacccgtctccacagccttttcgagcttgagggcaaggatgcggttcctgatcttcgagcgcgcgatgagcaggatgatgcccacgatgagcaagaggaagataaggcccaccgccagggtggcaacggggttgtcgtagagcagcgactggatggatatctggcgattggtgagcgagatgacgttcttggaaagcaccgtttccatctcctcggcgctaaacccgttgaccgccttgctgaccacggaatacagttccgaatcgaccggctgagggaacgcgatagagtagctcgcatcggtgtgatcgactgcaaccggagtgatgttggcgtagtagtggttgatgtagaggccctcggcatacgatgcaggcaagcaggtcagatcgacgttgcccttattaagcgcgtcgaggcacagttcgtaggacggatagtattcgacgcgcgaggccttgaggcccacaggcacatcccttccctgcggcaacgcgagaacaaggccgtccgaggggtattcggaggatttgttgcgcagcacgacggcatcgagcgtggtgtagctcttggtgagggaaagccccatatcgttggcgtaatactcgtcgtccatgaagccgcccaccacatcggcttctccggaaagcaccaaatcgagtgccgcctggtagttttcggcgggaacgtattcaaaggtaagccccgtgcgctccgcgatcaggtcgaacacgcccttgacgatgccgcgatacgaccccccgctttcgtaatagaccggatagaggtctttcaccacggcgacccgaacaggatccgcccggtccacgaacgcccgatccttgtcggtgaggccgatcgtgtttatatgcacatcggcgaaatatttctcgtagagctcatcggcgaacgtcggatcggccgtatagatgctgatcatagcctgattgagttccgaagcgatctcgggttcgtcggccgccgcagtgatgtaatacggttccgatttgaaacgcgccgccacatcgcaatcgtcgcgcatgtcgatatcgctgctcaggagtatatcgacctccccattgtcaaggcaggccaaatacgactgcacgtcatcgtagtagcgtatcgcgcaatcgagcttgttgaaatcgaggaaattggagagacgggcgatcttgtcggtcgcattcgcgttgaccccgatcgtcttgccgttcagcgtagtcaaatcgaagctcttgatatcggggtcggtctttttgtaaagcagcaccgaatagttcgaacccatgatgtaatcgggatagatgacggcttccttgtattcttcacggtagaacatcccgccgacaagatcgtattcccccgcgagcacgccgggaagaagatcgtcgatatcacccgatacgaactcgtagctccatccggtgtacttcgaaatctcgacgagccaatcgtagaaaatgcccgtatgaatgccgttccgatcggtttcgctgacgcccttcgcctgaggaaaggcgaccttgagcacccggcccgaatcggcgtgcatgtcaacatcgggaagatcggcagaatcggcggaatcgcgtgaggtatcggcaccggaagaagcatccgagctcgaagagcccatgctgtacgcccctgccccggacgccggctcgccatccgcagcatgcaccgcagggggaaacgccgaaacagccaggatcgtcgccaagacgacggctgcaagccttctcatcgatgcataccatccttcctcaaacccgttgttcgtcagcttcggcggaatcgagcaaagccacccgataatttatgttagaacctactgaacaaataggaggcgactgacaatcaaccgttaccgtaaggataaccgttccagtcgtaaaacgcggtaacgatagagctacagcatgtcgtgggggtcgacgtcgatagcgacgttgacggtcttgctcgccttgcgcttccgaaacagcggcaggagaacggccgacacgtcgtctccggcaggagccttcaccacgatgtgccagcgatacgttcccctcaaacgggtgagcgtgcagggattggcgggaagcaccgaccagccatcccctgcttgttccctcaccgtgcgctcgatttcccgggaaagctcgcgggcggcctcctcgaccgcgcgctcgtcttttccccatacgagaacgttggccatgcgaacgtagggagggtacttcagaaggcggcgtttcggcagctcatcgcgcaagaacagcgaccgatcgtaggttgcagccgcgcgaatcgcgcacgaatcggcccagtaggtctgcaccatcacgcgacccggcagctcggcgcggcccgcacgtcccgcaacctgttcgatcagcgcaaacgttcgctctgcgctgcggaaatcgggaagcttcagcatggtatcggcgttgatcacgccaacaagcgtcacatcgtcgaaatcgagtcccttcgcgatcatctgagtgccgagcagcaccgccgcacccgaagatgcgaattcctcaagcaggcgctgatgcgcccccttcgccgacgtcgtatcggcatccatgcgcacgatatgggcgcccgtcccctcgagcacgcctgcaagttcggcctcgacgcgctgcgtgccggcaccgaacttcttgaggtaggggcttccgcattcggggcacaccggcggcacggcttcgcgatgcccgcaatgatggcatacgagcgtgctgcccttctcgtgataggtaagagacgtcgaacacgacgggcattcgggcacgaacccgcattcgcggcacagcagaaagctcgcgaacccgcgctggttgagcatgaggacggccttctggcccgcttcgatggtttcgagaagggccttcgtcagcttgcgcgagaacatggagcgatgcccgctgccgaactcgcgcgccatatcgatcaccgtcacctcgggcatcggcttgccattggctcgttcggccaacaccacccgatgccaatcgtcgcgcttgtcgcagttgaacaaagtctcgatcgaaggcgtagccgaaccgagcacgagcgtcgcgccgcgctcgcgcaccatccacgccgccacatcgcgcgcattgtagcgcggcgaggaatcctgcttgtaggaaccctcatgctcctcgtcgatgataacgagacccagccggggcatcggcgtgaaaagagcgctgcgcgcgcccaccaccacgcgggccgcacccgagcggatgaggtcccattggtcatagcgctcgccctggctcatgcgcgaatgcatgactgcgaccgtatcgccgaaacgcccgcgaaaacgcgcaaccgtctgaggggtcagggatatctcggggacgagcacgatggcgccctcgtcgcgggcgagggcatcctcgatcgcctgcaaatacacctcggtcttgcccgaaccggtaacgccgtcgacgagcacgacttccccgctagcccgcctctgggcgtccccgataaccttgagcgcctccgcttgccctgaagtcaactcaggtttggcgctcgcgacgaaacccgtcgagccggccgcccccgcttcgccctcgcaaaggccgcgcatcctacgacgcgattcgatttcgatcacgcccttatcggagagcgtcttgagcaccgacgagatggagccgagctccatagtcagctcggccacccgcagctcgcccgctgcgagcgcgtcgacgattgccttctgctttacggccgtcttcttcggagcgaagccggatgcggcgggcccaaggcgcacccaccgatcgtcgaccggcccgatcgaaggctcctcgaggcgccaatacgtaccggtatgcaccatgcgcggcacgccgccgggaggagtgaacaggcgaatgcacgaacagagcggtgcgatgtactcctcgctcaagtactgcgcgcaccgggcgcccagctcgtcgaaatacgaatgggacagcacccgcccgatcgagcgcagcttcgacggatcgaggccgagcgccgaaaacgcgaacggatcgccctcgtcgatttggctcaactcgacgatgtagccgatcgcctggcgattcccaaacggcacgagcacggcgcagccaacctcggcgtcgacgaattcatcgggcacaacgtaggtgtaggccgaatcgagcgattgggtcggaatgtcgagtatgaccgaggcgagtctcacgaaaccccgcaggcagccttaagctcttcgacgcggtcggcgcgctcccatgtgaactcgggaagctcgcggccgaaatggccgtaagcggccgttttgcggtagatgggcctgcgcaggtcgagcgcatcgacgatggcaccggggcgcaggtcgaacacctgctgcaccgcttcggctatcgtctcttcggcaacatggttcgtgccgaacgtatcgaccatgaccgatacgggcttcgccatgccgatcgcataggcgatctggatctcgcagcgatcggccagacccgccgcaaccacgtttttcgcaacccagcgcgccgcgtaggccgccgaacgatcgaccttcgtgcaatccttgcccgaaaacgcaccgccgccgtgacggcccatgccgccgtaggtatccacgatgatcttgcggcccgtcaggccggcgtcgcccatgggaccgccgatgacgaaacgcccggtggggttcacgtgtatctccacgtcgtcggcaagcgtgacgccctcggcctcgacaaccggcatgatcacgttggcgatgagctcctcgcgcagcgccgcatgctcgatatcttcggcatgctgggtggacacgacgatcttctccacctgcgtcggcttgccctctacgtagcgaacgctcacctgggtcttgccgtcgggccgcaagtacggcatcgtctcgttcttgcgcacctccgaaagcctttcggccaagcggtgggcaagatagatgggcatcggcatgagcgttttggtgtcgttgcacgcgtacccgaacaccatgccctgatcacccgcgcccaccttgtcgtactggtcgccgtcttcgccgtgctgggcctcccacgaaaggtccacgccgagcgcgatgtcgggcgactgctcgtgaatggcgttcatgacgccgcacgtttcgctgtcgaacccgaacttcgcacggttgtatccgatgtcggcgatgacggcgcgcacgatgctcggaatgtcgatgtaggcctgcgtgcggatctccccggtcacgatcacaaggcccgtggtggcaagcgtctcgcatgcgcagcgtacagccgccggatcggcgggcatcccgccgggagcaacgtaacccgcctcggcgagttcgatttccttttcgaggatcgcatctaaaatggcgtcggatatctgatcgcacactttatcgggatgaccttcggtcacggattccgaggtgaacagatacgacgcgtgctggtttgccatgaattcctccttcatcggtgtcggcaggaccaccttggctcttgcgccaggttggtgccgggatcttcgagccaactctcttccccggctcttgataaaacgggtgcttccgcgtgcggtctcagccgcaagcccaacgatggtatcgcaaaagggtatgcggcgcaaggctcggaagagccgattaggctatcggctcttcgcgatcgaccttgaacgtcggagcgcacaggccgccgtgatcgagcgcaatgatccctctttttccgtatcggcagtacattccctcaagctcgccgttgtagacgtacagaccgggcatcgattcccatgcctctaccttgcagcggtctccatcttcgggcagctcgggaaccacgagatccaccttatggggcgggtagtattcctgggcaacgtatccggcgtcgatgttattttcgacgatctcggcccagtccccctcggcgaattcgacgccgggatatacgccatgggcaccgtaatcgtcttcgggcttgatgatccacgcatccttatcggccttgaccgcttcgatgtcgagatccgaatcgcgcctcagacgataggttcgaggcacgtgctcgtcgatgaacgcgcactcctcttcggtgagaaacgaccttgtctcctcgtcgaacaagaccaccgaaacaaccttggaatgaacgaccgtcgttcgaaaatgcccgatgaggcacaccttctgcgctgctacggcatcgatgagagcctcacattcgccggaatgccgaatcatctcgctcgtcacggctcggcggtataccgcatcgacgacggttccgtcggccggatcgacaagatgctcgccgtcgaattcgaacgcccggacatcgacgaaacgcgcagggtagcccgcccgctcgaacgcctcgatgaaacggttgaaatcgctgaacacgccgctttcgcggaaatccgtcaccgcgacggtcggccgctccttcgcattcgggcatgcgcgataatcggccatgaacgcctccacccacgaatcgaacagctcgaactgcccgaccgcatagcgctcggcgaactcccgataggttgcgccaagctgcagggcacgacctatctcgagatcgcgcgacatcgcgccgctcccgtctgtattgaactcgcagaacttgaaagcacgcgtttcctcgtcgaggaacagatcgaaccgcgcaaggggaagcagctcgtcgtagcagcacggaagcaggatgagccgttcgacctcggcgggaaaatgaaacagcttgcgatacgccggatcgtcgagaaaccgacgtatcaccttggtcaggatcgcatgcgtcgtctcgcacaccgaacggagaaacgatacgtcatcggtccccacaaggttgggaacgtacgagaagggaacgggagcgccatgcgcccagatatcggaatcctccacgtagtcgagtgcagcctttctgccgggaacatccccatccaggctttccagtatctcgatgtactcgcgacggttctgtctcataacgtatctcgctccctcaacaataccgattccaattctgcttcctgcattgtcatcgcatcacgaaaccatgcgcacgtccccatcataatcaacacgagaaattcgcgggagccgagaaccgtttcgtcatcgagcagcatagagcagaaacgagcgacgctcttcggcggctcgtcgccgatgacggattggtggaagcgccggttcgtgccgaatcgtctctcttccaggggtacaatggcacccgaagcgctgcccgaccagataagcgcctgcgccatcgaacgcacgttcatacgcaagcgatgccgcacgcggcgcgcacgacgacctccggaaaggagccgcccatcatgccaggttcaaccaacgaggccgcccgcaaaggcggcgccctcgccgttgcgctctccgtcatcgcagcggtcgcgcttgccatcgcgcttgtcgcagcgggtcttgcggcatgctgcgcccggccgacgaccgcagtgctctcgcaggcgacaagcgccgactacgcttccccgtactcgaagggaaccctgatcgatctggccgtcgccacacgcgactacacggtcgacggcatcccgcgcgccgacgtgctcgagcagatcatggccgccgcaagcgccgaagcgcccgaggtgctcgccgattcggacgatcccgccatcgcgcttgcgaacgcgaacgagcgctacacgctcaccgaagacgcgctttcccatctcgacgacgtatacgccgtgatatcgactgccgcacccgcgctcgcagcctgcgcgatcatcgcactcgcaagcctgatcgccctcggtttcgcaggcggcaggcgccgcgtcggcatgacgctcatcgccgcgccgctcgtcgtcatcgtcgccttcgcgcttttggccgcctgggtcgtcatcgacttcaacgggttcttcgcagcgttccattcgctcttcttcgcaaacggcacctggacgttttccgccgattctctgctcatctgcatgtacccgcccgatttctggatcggcatgggggcggtctggctcgcagccacgctgctcgccagcgcgcttgccatagcggcgggcatcgcgatcaagggcaagaagagccgcagctagccgttcgagccgattgcaggcgaatcgccatcgcgctcgcgtcggcgagaatcctccccctcgagcaactcgaacagctcttcgcggctgtgaatgccgagcttgcggtatatgtggctgatgtgcgccttgagggttccatgggcaacgtagaggttcttctcgatctgcgaaggcgattcgcggcgcgcgagcagctgcagcacctcttcctcgcgcggggtcagatcgtgtttcgccgaaacgtctgagacgcgcatggcaagccggctcgacgacatggcgccgtcgatgcctcccccgtcgtgcaagctgacgccccatttggccgacagtcccctttccgtgaagagcacgactacgaacaccacgatcatcacaagcgctatagccgtgtagattcccgagatcaccgaggaggaagccaccaggggcagcgtcgccgacagcgcccagccggcgatttcgacaaggtaacgaatgccccgctcgatgccgtttatccaaaccgcgctgatgccgaagcggtacgtgatgttgctcagcacgagcatcatgaacatcgaaagcatcgtgtagcccgcatcgtagcaggcggtcatcaccacggcgttcgcgctcaccgaaggggcgacgaacagaaacgcgatgatcgacagcgggaaggcaagctggtagatcgtatcgaagttgaaccacctcgattccgacagaatgccgaacagcacaagggaagtcacaagcaagacccctatcgtgtttccgaagcccagcggctgcatgggaagggcgccgaagccgcaagcgaatgtacacgccgacatgagcagaaccggcttccagggaaacgcggcgcctccctcggccttgtcgtatttgcggggcagatccctctcgggcagccgcttcatgctcaagcgcacctggacaagcgaaacgagcggcagcacgatggcgaaaaaggcaaggtaaggcgccgacatccccatgaaaacccatttgatgacgcaccccaccatgatggcgagcgcgtggtagagagcgacgcgcatgggattgagcgatccgtagaactccgcccacatgagtatgagcgagccgagtccgccgcccgcaaacgccaggccgacgagcttgaccgcgccagtcgacagcacgaagcaatcgagcacgatgagggccgatccgccaacaagcgaaaccgccgttgccgcagaagccgtccggttggaccacagcggaacgatgcggcgggcgctgaacgcaagggcgaacgagacgacggcaatcgccccttcgaacacggcgtaatccgcgaaccctatcgtgggaaacgcctcgtacctgaaaaaagtcgcgagccacgcacggtagatcccgacgccgaggaaaacaaacggtatcgacccgatgatcccgaatacgttgcgccagcgcgcgaaaagaccgccccgtccgcccggcgcttccccgcgttggacatcggccctctccggctctgtgtcggtatgcatcaccttcgactcccctcgttggctaaaccccgcccggccccagccgcgcaaccatccgttttacgcctccctgagcctcaatcatagcgaaccgcttcccacaagcaaggggttacgcggggggttatgcatttaacccccaaggccaatggacgctcttgcttctgcggaatacggttggctcgcacaaggccagggaagcgtctcgcgaagatgcggccacaaagatagcccgcctgcaccgagcgaaagaatcctcggtcgggcgagccagataaggaggatacctatgaaagcattgtcacggcgttcttttctcacgggttcagcggtagcggcagcatgcggcggcctcgcattggcgggctgctccccttcgccgacaggttcaccgcaatcggcctcgtcggccaacggcgcctatgtcggcagcggcatgggaaagcacggcaacttcgacatagaggtcgttatgaaggacggtgacatcgaacgcatcaccgtgctgtcctcgaacgagaccctcggcatcggcgacgtcgccatggaaacgctttccaacctcatcgtggagaaccagacgctcgacgtcgatgccgtgtcgggcgcgtcgctgacgagcatggcgttcatgcaggcggtagaaagcgccatcgaagcctcgggggcgaaagcgagcgacttcaagaaaaacgggcacgcggcaccttcgatcgatgcggacatgccgacagaggccgatatcgtggtcgtcggatcgggcggtgcgggattcgcggcggccatcacggcggcgcgcctcgacaagaaagtcatcttcctcgagaagctcggcgtccgaggcggatcgacagcgctttcgggcggcgagatggcggcacccggccactggatccaaaaccacgaaggcatcgaggacagccccgagcttttggccgaagacatgctcaaaggcggcgactacatcggtgatcccgatctcgtcaacgtcatcgcccatggcgtgctcgacgcaacgcagtggctcacctacgaaggcggggtttcctgggagaacaaccttctgttcttcggaggccattccgtgcgcaggagcatcatccccaaagggcatatcggaaacgcaatgacgacggctctgaccgagcggtgcaagaagctcgacaacatcacgctcgtcgactacatgaaggcgaccgagctcgtaaccgacgcgagcggagcggtgaccggcgtcaaggcggaaagcaccgtttcgggcgagccttacgagttcaaggcgaaagcggtcgtcctcgcaacgggaggcttcggatccaacgtggagaagcgcacccaatacaacgccgatatgggcaaggaaatcggctcgaccgactgcgtaggggctatgggggaaggactcgacatggcttcggccatcggtgccgagctcatcgacatggaatacatccaaacataccccgtctgcgacgtcgaaacgggagcgctcatctacatcgacgaccttcgcctcgagggccgcacgatcatgttcaacaaggaaggcgaccgcttcgtcgaagaactcgaccgtcgcgacgtcatatccaaggccatcgtcgcgcaaacgggcggcgtcgcctacgagctcttcacccaggaagccgccgatgaaaccggcgtcgtgcaaacgcacatccacgaatacgagaacctgacggcccgaaacctcatcgccaccgcagataccatcgaggaagcatgcgaaccgttcggcatcgacgccgcggaactcaagaagacgatcgagcgctggaacgaattctgcaagcagggcaaagacgaagatttcaatttccgcgccgacctcgtgccgatcgaagagggtccttactacatattcacgtgcaagcccgccgtccattacaccatgggcggcctccacatcaacgtcgacgccgaagtgctcgacgagtcgggcaatccgattcccggactctacgcggcaggcgaggtcgccggccataagatgggcacgaaccgcctcggatcgacctctatggccgacatctacacgttcggccgcattgccggcgcaaacgcagcggagttcgcatcgtagaagctgcacggccaagagcatcccggcgccggattcccccgaatccggcgcttttcttatgccgcccgcactcgatccttcattcgaacaacagactatcggcgtagtgcgcttgcggttcttgcagtagaataggcgaagctgagacgagttcgttttcgagatcacagaaaaggatatgacccctgatggctgacacttcatcgaaccgacccgtgcgcgtaagattcgcaccctccccgaccggcatgctccacatcggcggcgcgcgcacggcaatctacaactgggcgttcgcgcgcgcgatgggcggcacgctcatcctccgcatcgaagacaccgatcccgagcgctcgaccgaagagaacacccagatcatacttcgcgctatgaaatggctcggactcgattgggacgaaggccccgaaatcggaggcgcgttcggcccgtatttccaaatgcagcgcaccgacacgtatgccgaggcgctcgaaaccctgaaggagcgcgggttcgcctatccctgcttctgcaccaaagaggagctcgacgccaagcgcgaggcggccgagaaggaggagggcggctacgccggatacgatcgcacctgccgcgcgctcgatcccgaggctgccgctgcgcgcatcgccgccggagagccgcacgtctggcgcctgaaggttcccgacgatcacggccccatcgaattcgaggatgcggtttacggctccctgagctttcctgccgacgtcatggacgacatgatcctcgtgcgcaccgacggcacccccacctacaacttcgccgtggtctgcgatgacgcaaacatgcagatcagccatgttatccgcggcgacgaccacctctcgaacaccccgcgccagatacttatctacgaggcgctcgggtttcccgtgcccactttcgcacacctgtccatgatcctcggacccgacggcaagaagctctccaagcgccacggggccacctcggtggaagaatactgcgaacgtggctacctgcctgatgcgctcgtgaacttcctcgcgcttttgggctggtccctcgacggcgaaaccaccatcatcgagcgcgacgtgctcacatccaagttctcgctcgaccgtgtaaccaagaaggacgcggtgttcgacgaaacgaagctcgattggatgaacggcgtctacatccgcgagatgacccccggccagtgggtgcaggcctcgcttccctggctgttcaaagcgggagccacggccgaggacatcgccgcgcgacccgattggtacctcgccctctatccgctcgtcgccgaacgcctcgtgcgcctcgacgaaacggcagacaaactcgcctacatgttctggggcgccgatgtggagctcgacgagaagagcgtggcgaaggtgcttgcgaaagagggcgcccgcgccgacgaagcgctgcgcggatgccgcgctatcctcgccgacgagggcgttgcgtgggaatgcgagcctctgcaggaagcgtgccgcaccctcaccgaaacgctcgatatgaaagccaagctcgtcttccagccgttgcgcgtggccgtatgcggcaacatggtttcgccgccgctgttcgaaagcatcgagctgcttccccgcgaagacgtgctcgcgcgcatcgacaagactattgcggaggtgttcggtggctaacgaacgcgacgagagtctcgaaaatcttgcagaagagacgttcgacgaggcgatggcccgcgaagaagaacgcgaggcttcgggcgaggagccccacaaggcgcccgccaaggtgatcgtcgtgcgtgactactgcgtgcgccacaaaggggcttcctgcaaccgctgcgaagtcgcctgccccaaaagcgccatctcgttttccgacgacgatctgccggttgtcgatcaggaactctgcacgcgatgcggcatttgcttcggcatctgcgacgccctttcctcaacccgcatcaccatgatcgatctgcatgcccgcatccgccgcattgcgcttcgcggagaggatgtctacctcacctgcaaggaaaacatcttcccagggctcgatcccgcggctaacgtggtcgtactgccatgcctggcgtgcctctcccctgaaatttggacgctcgtgctcgcagagaacatccgagtgaaagtcgcctgcgatctgagctactgcgccgattgcgagcgcgccggggagatggccgagatgctctactcgcacgcgatcgaatcggcggaatcctggacgggcgaaaaggtgctgttcgccaccgagatccccgaaaaggaacagctcctgaaaaacctcgcaaaccccaccggggtcgaccgccgcgccgcctttaccaatctggtgggcgacgtaggcgatatcgcttcgggaaaacgccggctgcgcaactcagaagtgctccagcagttctacgagcggcgcgaacgggcacgggccatcgcgaagctgaacctcgccgaagacgacgtcttcaacaacttcgtgcccatgggcatgacgaaaaagaccatgacccccaaaaggcagctgctgctcgaagccatcgatcgcaagccggaaatcgcgaaacgcatccccgtgtacctttccgaaaccgactgcagcctctgcgccaacgtgctcgaatgcacgaaagcctgcccgaccggtgcgcggttccccgatcccgaaaccggcgttctctcgatggacgcgcgttactgcatcggatgcggaatctgcatcgaagcatgtcccgaaggtgcaatcgacatggtcgagacgacggccgaagccctcctgcccgccgcaggcagtcgggacgaagaatcctgaaacaaataaaccgactgtccggatgcgcatccggacagtcggtttcagctaggcgttttcgccccgctcccctctcgccgcaagcgctcccttgcccgcaagcgcgcgcatcgccgccgacacgcgcttcttctcggactcgttttcatacgcggccaccgcaggggcgacgaacccgtagtagagcatcttcacaagcgggccgacaacgaagaagttgaagcagaacgccgcgatccacgtcgccgggaacagcgacgaatacgcctcccatgtgatgttttcgaagccgcctcccgtaacggccaatccgaaaacgcccatgatcgaggccatgaacaatacgttggcaagcgtaatcgcaacagatcggacaacgccgtcgagacgcttcgcaagcacgttgtcggcaaagcgcccgacgatcggatttgcgatcagcagccgcacggtcagcgcaatggcgaacatgacggggtactcgtacagggaaagcgcgaaatgcaacggcgaatggtcgtcggtatgaaggttccagttgaacgtgaccataacggcaaccatgaaaaacaccatcatgatctgaaacacggtcttgcccgccttgtcgcgcggggcgcccgccttcccggtaatgcaatctctataacgtatctgctgcgtatgcttcatgttgttcgttgacccttctttctctcgtttggttttcggcggatatcggtttcgacgccaaagcaaccgcaaaggccggctgcgcacggcgaaccggctcggccgaaaccgctgaaagcgcagccgcacgcaaacatgcgaaagaaaaccgaagtcgcacgcctggcaaaaaagcgcatatgccgcccgctcgcaagcatgcaaagcacgcagcttcgataagcagttgttttggctttgggctttcagaacctcgcatctgagcgagtaaagcgattcggacgccgcccgaacaggaatacccaagaataacctaccgatgatcaggtgcttacccgatcaccatacgagtatactcccgcatcgtcgcacagaatccgacggaatcgcctcgatagaatatcctcacatgcgcatcatagcgtatactcttgcccacgcgcaccgattcgcgcgcatcgcgcgcctcgttcgcaagaccccgcacgtaccgacttcgaaggagaacgatggaacatcgggactcgccccctcccggcaacaccccgccccgaacggcctttgaggacatcccttcccagcgggaaaccctgttttgcaacgtgctcgcctaccagcccgtcaacgagcaggaagcggccgacaaacaggtaatcctcaactgtctcaaaacccagcccgactgcttcgaccgctcggcgctcgcacatatggcgtgctcgatctggacggtcgatcccgcaaaaaccaaaaccctcatggtgtaccacaacatctacgactcatggtcgtggatcggcgggcacgccgacgggcaatgcgatctcgccgcagtcgcgctgcgcgagcttgaagaggaaacgggcgtatccgatgcgcggctcgccccgtgcggcatctattcgctcgaagtgctgacggttgacgggcacgtcaaacgcggcgaatacgtcggttcgcatctgcaccttaacgtaacctacctcgccatcgcctcgcccagcgaaccgcttcgcatcaaacccgacgaaaacagcggagtcaaatgggtggcgcttgacgaggttgtcggcatatcgaccgaaccctggatcgccgagcgcatttaccgcaagctcatagacaagctgccttcgatcgacctgagcacaggttaaggttcccttaatacctgtgggcactgtgcgctttatggccgccggcgggacggcgaagagaaggcccagcgatgtcctgtgatatcattcggggcaatcacgtcaatcgaaccgagtacgcgatcgcgcaaggagatacgatgagcgagcagaaccccgacggcgcaagcccgtcgcccgacagcaacgaaccgatggatccgaacggccagccaatgccccaatcggaccaggccgtacaccagcagccagctccgcaaggacaggccatgccacagggctatactcagcagatcccccaaccgccgacgtctcagtacggcgcgccgtccagcccttacgggcagccctatcagcagcagccttactacaaccagcaaccttacgggcaaccctatcagccgcctcaacagcccccgtacggcgctacgggataccagccgcctcaacagcccccctatccgccctatggcatgcagggacaggagccgccgaagaaaaaagtgtggccttgggtcttggtcggttgcatcctcataggattgctcgggttgggcggatgcgtcggatgcgtcgcctgcacggcggttatggccgattccaaccgatcgagcagctattacgatccgtacgactacggctacgactacgactacaactacggctacgacgatggttacgatttcgacttcgatagcgacgactactcgtcgctcttcacgtacagctattccgacatcatggccagcaaagacagctacgacaacacgatcgaaggcggaatgatctcgaacggcatctacgaagtcggcgtcgacatcgaaccggggcgctatttcatggaaggtgacccgaccgtcgaatcccaatacatcgtatacgaagccgctgattcttcgagcaaggaatacgacctcaccgaatcggtggtctatttcggcaactactacgccgatctcgaaaagggggatatcatcgttttctctcccgtgtcggatcaacgcatgatggcggtcgccgatgccgagttctcccccgccgcgccgtacggaagcgggctgtacctggtcggtaccgacattccggcaggtacctataccgtgaagtacgaagacgcttcggccgtaaatgcgtccatggaagccgccgccttcctcatgaaagacctcgaatgggacgacgacagcatcaccgaccgatactatgcggcgaagggcggaagccacaccatcaccgtcgccgatgggcagtgggtcgaagcgtacggggtcacgctcacgcccgtcgatgcgtcttaggatgggggcgaacatgccagagccttcagctcctatggtatgcgacggggcgccgatcgaggaagttcgcgctttcttcgccgacgaccgattcgcaacccaggcgtgcagagccgagataatcgaagcgcgtaaaggccatgccgtctgcgaatgccctctcgaacccatccaccgcaacgccatgggcggcgttatgggcggtgccattttcacgctcgccgatttcgccctcgccgtcgcatcgaacgtcggcgaatcccccacggtctcggtaagcaactcgatcgagttcatatcgacagtgaaaggaagcaggctcatcgcaacctgcgaggcggacaaatcggggcgctctttgggattctacaccgttaccgtggaagacgacctcggcagatgcatcgcaaagatgacggccacctgctaccgctgacaacgctcttttcgacaatcgcttctcaagcataccggcaaacggaaaagcgcggatcccgactaccgatcggggtccgcgctttttttaaattccgctacccggtaatcattcggcattccgtcttgattattctatagttctataataatataaatatagaatatttgcgggggagagagaaagggatgttcgaatcgaagccgcaatgttctcgcgccgtctcggccatcccgctttatcgggacagcgcatactgtgataagtggagcttcgcagctcaacgaaagggggattctatgtcgcgatacggcatggtaatcgacatgacgcggtgctctgggtgccagacctgcgtaatcacctgccagatgaacaacaaccagaggcccggcgttgcctggagctcggtcgatacgatcgagttgggaacatggcccgaagcggatcgcttcgcccttccccacgcgtgcatgcattgcgaaaacgcgccgtgcgtacacgtctgcccgaccggagcgagcgtgcagcgggaaaacggcatcgtgaccatcgactacgacgcgtgtctcgcgtgcggagcctgcctgatggtctgcccttacgacgcgcgcaccataagcttccgcgatgcctggtacttcgatgccgatgcgcctgctccgtacgaatcgtacggcacgccgcattcggatgtcgccgagaaatgcatcttctgcgccgatcgcgtcgagaacggacttatgccgcactgcgtcgacgcatgcccgaacgccgcacggatcttcggcgatatcgatgatccgaacagcgatgtcagtgcctacatcgaatcgtcaggagccgaagagctccgcggcacatcggtgtattatgtcaagggggatcataatatcagccttcgcgaaacgcttatgaccaccgcttccgacgtgccctcgctcttgctcgacgaacccgtcgcaacgccgcagggcgaacagcaaggagccaacatggccgtcatcggcgccgccggcgtcgccgtagcggccgcagctgcggggatcgggtttgcagcgggtaacagccgcggaaagaagaaagcccttgcgggcgtcgaaggaaaggacggtgactagcatggtcgcccaaagaaactctcgcgttttcggcacgatttcccgacgctctttcatcggagcggcggcgcttggagccgcggccatcacagcaggggggctcgagacggcaaacccgaaaacggcgcatgcggccgatgacggcggcgaaacgcactgctacacttcatgcccgatgtgcaaccaatcggtgttctgcgggctgaaaggcaccgtcaaagacggcaagctcgtccgcgtcgaagggaacgatcagcactccaagccaaaaccctgcctcaaggggcttacgagcctgcaatacctctacgatccgaaccggttgctctaccctctcaaacgcaccaacccgaacaagggcatcggcgaagatcctcagtgggagcgcataagctgggacgaggcgcttgaaaccatagccgccgaattcaacaaggcgaaagagacgtacggcgcaccctcggtcacctttcactcgggcgatccgaaagagcacctacccctgtttcagcgcgtggcagccctgttcggcacgccgaacgtttcatggggcggcgcccaatgcgcattcgcgctcgcaatgtcggggattctgtgctacggcacaaccgtgaccacgatgccgagcgcggaaacgaatgtgcatctccaatggggttccaacatcgcctggtcgctgtatccgcagccgaccgcctacaagggcatgctcgacgcgaagaaggcggggtgcaaatacatcgtcatcgacacgcgcatgacgccgaccgccgtgcagcttgccgatatctacatgcagccgcgccccggttcagatggagcgcttgcacttgccatggcaaacgtgatcatagaagaagatctgtacgatcacgatttcgttgagaattggaccgaaggattcgacgagtatcgagattacgtaaaggagttcacgccagagaaagcggaggagatcacctgggtgcccgccgaccagatacgcgaagccgcgcacatgtgggccgaagcaggccaaggcaccatgtgggtcagccctcattcgacaacgcatcactccaacggcgttcagagcacacgcgccatcacattgctcttggcactcatgggctactgggatcgcgaaggttgccgcaaagtcaccccgggcgtcacgggaaccgccgatgccgcattcaggctcaccgacgtttcgggccccttgctcgaccagcgggcgggagtcgatcgctggccggtgtggtcggctatgtcgacgtactaccagaacaacggtctgctcgaatacatcaacgacggaatcattcacgccggcgtgttcctgggaacgaacctcatgaactttccgcagacccagttgatccaagaagccgtatcgacgctcgacttcgccgtcgcagtcgacatgcatctcaacccgtggacccacgactacatggacatggttctcccggcggctgtttgctgggagcgcatcgcccccttccaagcccagccgaacggcatcatcggcagccaagccgccatggaacccgcaggagaggcacgcgaggactggcagttcctgctcgatttgggctgtgcgctcggcttcgaggaggagtgcttccacggcgatctcaaagccgccatgcaagcctacctcgatgccggggggtcgggagctaccgtcgatgatatccagaacgcactgccaggcgtatacgaactgcctctatctggtgaatgggctccgaagcagtatgagcaaaacggcttcgccaccccatcgggaaagatcgaattcaagtcgggcatgcttgagaaattcgggttcgacgggcttcccatctacgaagagccccacatcagccccatttcaacgcccgacctgaccaagcaatacccgctgatcctcacgacgggaaaccgcgttccctggtacgttcacagcaagtatcgccacactccctggctcaaccaattcatgcccgaacccatcgtgaacatgagccacgaggatgccgaggcacgcggtctggccgagggcgatgcggtcaggatctacaaccagttcggcgaagtgcggttcaaagtcgccatcaccaacatgatgcatcccggcaacgtagagatcctccatggatgggagcaggcgaactcctgcctcctcatcgatcgggtattcgatccgatttcaggcttccccagcttcaaggacgccctatgcgagatcgagaaggcataacggcccgatcgcaacgcgactgaaccttcggggtcgcgcaacccgcacgatcccgaaggattcgatcgaacgacgcaacgcccatccagtccgagaaaggaacatcatgagcgcggaactgattgcaaccctcgaagaacgagccgcaacctacggcttgcttgcccggctcttcaatcgggagatcgacgaagatctcctcgaaaatctgggcagcctgcccctcggcggcgaaacaccagcaggctcgccatgcgagggcgcgcgcctcatgcaggcgtacctcgatgcaagcggatccgatgccattaccgagctcgcagtcgattttgcacggctcttcatcgtgaggacggcgcgcacaaaaaacgcgtcctatcccttcgaatccgtgtacacctcaaccgatcggaccatcatgggcgatgcgcgagaccgcgtgctcgcagcctaccgaagcgaggggctcgacaagagcccctcgtggaagctcgccgaagaccacgtttcgctcgagctcgaattcgagcaactgctctgttcgcgggcaggcaccgcactcgcagacggcaacgaggcggaagtgcggcggctcctcgtcaaacagcgtgaattcctcgacgaccatttgctcgtctggacgccgatgttcgccgaagccatgcaggtcggtgcgaagaccgacttctaccgaggactcggatctttcttgcttgagtttcttcaagatgacaggaagcatcttgccgagatagccgactgaccgacggtcaacgagcatcggggcagccatcctgctatgtgataagatggcggaagcgattgcggcgcaaggaggctgccatgacgagatacggaatggccatcaacatggatcaatgcataggctgccaaacatgcgtggtatcgtgccagctcaacaacgctcttcgacccggctcgtcaagaaacagcatcgatcgcgtagagcggggtcgatggcctaacggagatctcttcttctttccccatgcgtgcatccactgcgacgagcccctctgcgtaaaagtatgccccacgggagcgagttcaaagcgaacagacggcatcgtggcgatcgatcacgagctctgcatcggctgcggcgtatgcattaccgcctgcgagttcggagcccggtcgatcggcacgcaggacgaatggcactacggtgcgaaagaccccgctccctacgaggccgagggaatgcagcccgtcaacgtagccgacaagtgcaccttctgctccgaccgcatcgatgcagggcttcaaccagcgtgcgtgagcgactgcgttgcaggcatccgggtattcggcgacctcgacgatccggacagcgccgtcaacgcatacatcagagagcatcgatgcgtctgctcgcccgattcggcggtgtactacggtcgaggcgcacgggacctcgacgtgcaagagcacataaccgaaacctactaccgatcggcaaaagccgatcgggagggccaaaagccgcaggaggtccggggaaaccttgccatcgtaggcatcgcaggagcagcgacggcggcggctgttgcggggctcggcgtttcggcgcggaacagcaggaagaaaggaaagcgaaacccaaaatccgaggatcgtcggtaaagaaccccgataagcacctcgatcattgcagggaaaggcgggattggtaaccgtgttcgacagctccatcgtatggtatctgtttcttggcggcacaggggcgggcatgctcgccgttctcgcaggtgccgatatcctgttctggctggcaggacgtccgagcgggcgcgatcggctcgcttggacgtcctgcctcgcgagaccgctctttgcacggggccttccgatcgcatccctccttctcatcgtgggagccttcagtcttctgatcgacctcggtcatccagagcggttcttttacgtgatcctccaccctaccgtctccgtcctcaccttcggatcctacgcactggcggcggccgtcctctgcgccgtctttctcagttcgatagccctgttcaacttgacccgcattgcaccgaccatcatccgcatcgtcgaggtcatcgctgtggcgctggggttttccatgatggcgtatacgggggtattccttgcgaacatcgacttcatccccctctggaacaatccgtttctgcccgttcttttcacgttctcgtcgctttcatgcggaatcatgtgcatggcgtcctgcgcgctgttcgaacaaccggataggagaaacgtcctgattgccgcgtttgcgaaagccgatgccgccgtaataatcctcgaaatcgtcagcttgggcgcctatatcgcatacggattgctcgtacagacggaagcgcaagcaatcgaccgcttgcttgcaggcgataccgcccggctcttctggataggatttgcctgcattggcgcgcttctgcctttggctttcgaagcggcttccactagaataggcactaccgcattgcccgccttggcaatccccctcgtcctcattggcggctatctcttgcggtactgcatggtcaacgcgccgtacggataaggttggccgaacgatgattacggaaaccgatatgaaagtgagtacagggtggcgcttttcgagttagacgaacatagcggcatccctatctggatccagcttcgcaatcggctcatgtacctcatcgattcggggcattacaaaaacggcgacaggcttccgacggtacgggcgctcgccgccgatctcaacgtgaactaccataccgtcaacaaggtgtacacaagcctcgaacacgacgggtacatcagctcgaaacgcggacggggagcctttgtcgagaagatcgcagccgacgatgacggaatcgatatctcgggagacgtcatcctggccgaaggcatcagacaatgcctcgagctgggtatgacggtcgaagatgtgaagaagcgattcagcaaagcgttagagggattcgagcagtagcgcccgaaccgcccgcaaaccatccaaccacgtgcgaaccagggaagaagccatgaaccgtacgaaaaaccttgcagatcaaccaaccgaacgaacctcggaccgcaaaacggcgctcgccgaaccgccgaacgcattcatacctgcgaaggcaactcgcagcggggcaacgctgtttgcgatcgtccaagcgacaatcgtgttcgcgctcatcgtcgcagtatcctatttcggcttcggcgcgctcaccctttggactctcgtcatcgcgctcatcgtagccgttgccgcctccatgacgatccacatcgccatggaatgggagcgaatcgtgatcttccgcttcggcgcgttcaaccgcgttgcggggccggggcttattttcatgattccggtcatcgaacaagcggcgtgccgcatcgacatgagaacgatcgcaacgacgttcggcgccgagaaaaccctcacgtcagacctcgttcccgtcgatatcgacgccgtgcttttctggatggtctgggatgccgaaaaggcatgcgtggaggtggaggactacagcgcagccgtgctctacatagcgcagaccgccatgcgcgatgccatcggctgcgcaagcgtcgccgaggttgccctcagcagagaccagctcgacaaagaactcaaagaagtgatcgagcgggaaaccgaaccctggggcatcgccatcctctcggtgaagattcgcgatatcgtcatccccgaagagctgcaagatgtcatgtcgcttgaggcgcaagcggaacgggagaagaacgcgcgcctcgtcctggcaagtgccgagcaggacatatcggagatgatctcggcatcgagccaggtatacgaaggaaacgagaacgctctcaagattcgaaccatgcatcttctctacgaaagcatcaagaaatcaggcggcaccgtggtgaccgtaccctcatccttgagcgacggcatcggctcgccggctcaggatgccctgaaaaacctcggcgataagaaatagcgctcgggcttcccgcctgaaggccgagccattcgcccccgacggatccgaatggcaagaagccgtgcggatccgtcggagcgtcttgatctcacttctcttcgttacgggcgaagaaccggctcgcattctcgaagaacaccttgtcggcgagcgcttggccgaagtgctcgccgatgagatcgtggagcgccgataccttgtcagcgcttccgatccagctcggtacgtcgcagccgtcgtagtcgctgccgagagcaagcacgtcttctcccccgacctcgcatatgcggtcgatgtgcctgagcacgtcgtcgcgcgtcggatcggcatggacgtcgctgaggaactgcgcacagtagttcaacccgatgacgccgcccgaatcggcgatggcgcgaatctgggcgtcctcgaggtttcgcttgtgcccgcacacggcgcgcgcgttggaatgcgatgccgcaaacggtcgcgtagcgatatcgcacacgtccgaaaacccgcgatcgttcagatgcgatacatcgacgacgatcttccgctcctcgagcgccgacaccacgcgcctgccgtaggggctcaggccgtgcgccgtgtcgtgcccgctgccgatctcgttttccccattccacgtgagtgtcagcatcttcacccccgcttcggcgattcggtcgacccgatcaagcgatcccccgtcgaagaacgcgcctccttccaccgtgagcagcgcggcggttttcccgccgtcgagcagatcttcgagcatgcgcgcatcgcaaacctgctgcacgcgatcggcgtaggcggccatttgaccctcgaaataggcatgaacctgttcgaaaaagcgccaggcggcatcgccgcgcagctcgtcgggaatgaacacggcgaagcactggcaccatcggtaccgcgcaatccggtcgagcgatatatgcgcgtcgttgtcggcgagcgagcacatgcgctcaggggagacatcggcatcgtgcaaagcgaacgtcgggtattcggccgatcgacgcaacgcgagtcgttcgagcgtatcgcagtgcagatcgaacacctgcaaccgtttttccaagtcagtttcttcctgcatcgtttcgcccaaccttgccttcaaatcgacttccgcgttcatcgcgcctcatttcaaccgttcgaaccctaccaaacaccgaagggccatgcaagccgacccgaacgcaaaacagggtcagggcgaaccgggtaaagcgcgcccgctcaatcgccccccgctgcgttcctttcgcccttcgatgacgttacaagaaaaaccatgacgatcatcagcgcaaaccctatgcaatcagccagcgggaactgcgtgccgagccacgcgcatgcgaaaacggtagcagaaaccggttcgatggccccaagcaaactcgccctcaccgggccgatatcggaaacgccctgcaggtagagcgtgaacgcggcaaacgtacccagcaccacgatggcggcaagcgctgcgaaacccgcaccgtcgagcgaaatcgaaagcgtccagggttgcgcgagcgcggtagccacgataccgcccgcaagcatgccaagccccgtcaccgcaacggctccccactgctcgagcaaccgtttcgggtagatgatgtagaacgcgcaggcgagcccgttcgcaaggccccataaaagaccgggaagcggaacggcgagcgtcgaaggatcgccatgcgtcgcaatcaggtaggttgcgccgatcgcaagcgcaaggccgccaagctccttcgccttcggcaggcgcttggcggcaaggcatgagaacagcatgacgaacgcgatccccgtgcattgaagcacggttgcggttcccgcattggtgtaatcgatcacaacggtgtaggtgatctggttcagaaacaagcccaccgcaccgaagaccgcgacgcgcgccagtgtcgaacggctcgtcaccatggctttcaggcctgctctgttcgctgcaagcatgtaaacgagaaacaacaggccggcgcccagcatgcgcgcactcgtaacggcaagcggcgtaaagccgtacgcaccggagagcagaaactgagcgcatgcgccggagaagccccaaagcgttccgcccgcaagcgtgcagatcacgccacggacaaaacgccgcccggaaccggacgcagccacgctcatcgatgccccccttgcgcacgaaagaccctgcgcgcaaagcccgaacagcgacgccgcgcttgcagagagcctcgtcatgccagctccttcagaaaagcggcaatggcgtcgagaacgccctgatcctccttgagatcgaagtagcgcatcggtatggagaacttcttcgatgagggaatgtagcgggcgctatggcggcgcagtttggtcaccgtgtcacgggaaagcgctatgggttcgacggtcagcttgcctcccacaaccgatatggttttgatgccgtgctcgtttgcaaacgccttgatgcgggccttgtcgaagaagttcttcgcggcctgaggcatctcggggcggcgtgcgagcgtcgccccgtagagatcgtcgaccgcatccaccgtgtcggccgaagcgatctgacggtacagcagcacgcgctcatcggcatcggggatgtactcttcgggcaggtaggtgtgcgcgggcacgttgaccgagatatcggagagcgcgggtggaagggagtccgccgccttgacgtcgccttcgcgcgtcgcgtttacggcctgctgcagcatctgcgcgaacagatcgaaacccaccgcgctcatattgccgctctgctcggcgcccagcaagctgcccgcacccctgatctcgaggtcgcgcatcgcgatgcgcatgccgcttcccaaatccttatgctcgtcgatagccgtaagccgcgctgcggcctcttcggtaagcgcaacgcgctcggggaacatgaagtaggcgtacgcctgggtggcggaacgccccacgcggcccttgagctgatacatctgggcaaggccgaggcgctgcgaatcttcaatgataagcgtgttggtatgcgggttgtcgatgccgctttcgatgatcgtcgtcgcaacgagaacatcgagttcgcccgccacgaaatcctccatgacgcgctcgagctcctctttgcccatctgtccgtgcgcaacgcccacacgcgcttcgcccgccgcctcggtcacgcggcgaacggcatcttcgatcgagcgcacgcgattcgacacgtagtacacctgcccgttgcgcgcaagctcccggcgaatggcgcccgacacgacatcgggatcccactcgcccacgtgcacctcgaccggccgccggtcatcgggggccgtgaggatcaagctcatatcgcgaacgcctgaaagcgacatctgcatggtgcgcgggataggcgtagccgaaagcgtcagcacatcgatcgactcgcgcaggttcttgagttgctccttgtgacccaccccgaagcgctgttcctcgtcgatgatgacgaggccgagatcgtgcgggttcacatcgcgcgaaagcaggcgatgcgtacccacgagcacgttcacgctgccgtcggcaaaaccgtcgagcgcacgctgctgttcggcaggggttttgaagcgggaaagcacctccaccttcacgtgataaggctcgaagcgatccttgaagttcgtataatgctgctgagcgagaatggtcgtcgggcagagcaccatgacctgctttttatcctgcgtcgccttgaatgccgcacgcagcgcgacttcggtcttgccgaatcccacatcgccgcagataagcctatccataggcttcgccgattgcatatcggccttcacatcggcaatcgcggcaagctgatcgggcgtctcctggtaggggaaagcctcctccatctcgcgctgccacggcgtgtccgccgcatagcggaatccctggctcgccgctcgtcttgtgtacacgtccaccaaatcgaaggcaagctgtttggtggctttgcgcgccttgccgagcgcacgcgaccagtccgacgtgttgaggcgcgtgagccgaggcgatgcgccctcgggtcccacatagcgcgtgacgcggtcgagctgctcgaccggaacgtagagcttgtctccttcggcgtattcaagcagcaggtaatcgcgcatcgcaccgccgacgtcctgtcgcaccagatccttgaagaaggcgacgccgtgggcggcatgcaccacgtaatctcccggcttgtagggaaacgttatctcggtgatatcgacgcgtttgctcgacctcagcgccgtcgaaccctgcgtgtcggaaatggaaacgagcgcaagcttcgccttgggtatgatcatgccgagcggtatctccacatcgaccacgttcacgatcccgcgcttgagcgttgcgggcgcctccccttccgcatcgagaacctcggagatgggcaggttgttatccacgaacgcaagcttcatatcctgcctcgcgcggtagttcggcgccgagaacaccacggtgtagttgccgtcgacgagcgtccgcaaccgtccgaacagcttttcgggatgccccgccacctccacccgcttcaccggcagctcctcatcgacatggccgcctacgctcatgatcgatacgtaggtggcgcgctggttcttgccgaaatcaagctctgtaggagctacgtagagcccctgaaccggaatgctcgaccccttggcacgcccctcgatgtcctcgaacgcatggcttgcatcgtcgaacagcgaacgcggctcaagcagaaccgtcagagtatcggagcgcaggtagtctccaagcgtcgaagtggtggaatacaggtacggcaaaagcgcatccgatccgtcgaaacgcgcgccgccctcgagcttttcgagcatctcgcgcagaacgggattggttttcgcagggttcagaagcttctccttcgcgcgatgcgcgccgcgcgccgagagggcgaactcctggacggggtatatctcgacggagggaagctcggcgatggtctggcccgtcgagggaacgattctcctgatttcgtcaagctcgtcaccgaagaaatcgaggcgcaccgggtagacgagattgccggggtacacgtcgatcgctcccccatgcacgcaaaaggttccagggccttcgagttcgccggtattctggtagccgcgcgcctcaaggcttcgcgcaacgtcgtcgaacgacgccatctcatccgatccgagcgacgaaaggtcatcgccctcggaaaaggagagcggcttccaggtatcggatcccgcggggggcagcgcccgcagcatcgagcgagccgaagcgaccacgatgcggggctgccccgatgcgagcgatccgagcgcctgcatccttttcgctacctgacggggatcgggggttttcggattgaagggaaaatcggagcgctcgaagaagcgcagcacccgctcctcccccacatacgccgcaaggctgcgcgaaaacgcatcggcggcatcctcccccgccaccaccacaagcgtcggctgcggtttatgggtgaagcgagccgcgacgagaaacgggcgggccgacgaggctacgccgagcgcgccgtcctgcccgccgtcgagtttgttccaaaacgcatcgagcgattcggtgcgttcgagggccttcgtcagtgcatcgatgagcatatggttgttttcctatccctgattgcgaggccggatcggccgcaacacgaaaagccgcttgtgcggctcatgcggttgttcactcgtgaaaaacgggcatgcaacccgtcttcggcgcaccaattgtactacacccgacacgcgcgcactcgaccggcgtttgcgatatcatacaatcgtaaacatccatcgaatgcaattcgttttccatcaccgaaggtaaaagcgcgtcgcaaaggatcacaatgccccgagaaaccaagcaagcaaaactcgaacgcgccctggcggtagcggatcgaatgaacgaacactacccgcaggcagaatgcgcgcttcactacggcggcgatccgttcaggctcaccatcgccgtgctcctatcggcgcaaaccaccgataagggagtgaacaaggtaacgcctgcgctttgggagaaataccccaccccggccgatctcgctcaggctgacccaaccgacgtcgagaacatcttgcgaaccatcggcttttaccgcgccaaggcagcaaactgcatcaagacggcccagatggtggtctccgatttcggcggcgagatcccccgcgacatcgacgagttgcagaagcttcccggcgtcggccgcaaaaccgccaacgtcgtgctcaacgaagcattcgggatcgtcgagggcatcgccgtggacacgcacgtgttccgcatcgcccacaagctgaagttctccaacgccgatactccggcgaagacggaaaccgacctgctgaagctttacccccggcagtattggggccccatcaaccaccaatgggtgctcttcggacgcgaaacctgcatagctcgccggccgaagtgcgaaacgtgcttcatcaacgacctctgccccacgtacgccgcctcgcttaagaagaccgagaaacggactgccgcgaactagcctttcgcccaaaaccccgccgagcggatgcaccgagcagccgttcgccccctgatacggcagcgtactcgaaataatcccgattcggcccgacaatgccgcgcacacgctcgtatccgtttcagaaaggaacccctctgctcacaaacgaggacataacagcgatataccaccgtcacgtcgcgacggtatatcgcctatgcttctcgttcctcaaaacggccgcggatgcagaggatgcggtgcaatgcgtgttcatgaagctgattcgaagcgataagcggttcgaaagcaccgagcacgaaaaggcctggcttatcgtatgcgcttcgaatcactgcaaggacgttctcaaaagcgccgcccgctccaaggcgggctccatgcccgaagacgtagccgacgagtcctcggaggcagacggctacgacgaaacgctcgaagccgtgctcgccctgcccgaaaagtacaaggattgcctgtatctgcactattacgaaggatacaaaaccgacgagatcgcccggatgacgggacgcccgccctcgacggtcagaagccatttgagcgaagcgcgggcgctgctcaaagagaccctaggcggtgagagatgaacgattccgatatcaaaggcgcattcgagcgcatgggaccgacgcccgaagcggaagatcgcatgctcgcaaacatcctcgccaccaaaagcaccgtcgggcagcacgccgccgcaccgaaaaaagcgaggcacgccgccgcaccgaagcggaacaacctgcgcgcactcgccctgcccatcgccgcatgccttgtcgttttagccggcatcggcatgctcgtcgtcggacaagcgtatttcgccacattgggcaaccagctcggcgatagcggaagctctatgcaggaaaaggcagtcgaatcctacagcgcttcgcctgaagatgcgtcgagctctcgagacgaagcgtctccaagcatagccctcgccccgaacggcccagccgagcgcttccccgcgatagagctcgaagacggcacggtgctgctcatcgcgaaggacggctcttcgttaccgcttatcgccgatgaaaagctcgttggaggcgaagcgcaggaagcgacgacccgaagcgaggacggcgcgacgaccgaaccctgcaccgtgtacgcctacgcaaacgacaaaacccccttcgcagtgcgctaccccgacgatcccacctgctacctcgccgtacctgtcgagtagcgggctgccaagaaccgcgcaggcgcgtgagccgaatcgccaactccgaaaaaccacacggtttcgcctgtcagacggcaaggagatcgatcgaccgagggcgcattcggccccgccctcagcgccgccgactgcattccgtcaatccccatccgacaattcctccccccggttcgtattagaagagaacgtgaaccgaaggaggattttatgcagccatcgcgaaaaccgcttccctgctgcctgctctcgtttgtgcttgcagccgcgcttctgggaggatgctcgacgccggatacgttgctcggcctgagcgactcgaacggctcgtcgggcgaaaccgcctcgggaaagctctccatacccgcgcaaccctatagcagcgaccgtccgatgccttttgatccgtaccgccccgaaggcaacaccgaggagtactccgccatcgacgaaccggggttctactctgcgaaaaccaatccgctttcgacgttttccgccgacgtcgacacggcatcgtactgcaatcttcgtcgcatggttgccgaaggcatgcgcgcagccgacattccaaatgatgcgatccgcatcgaagagatgctcaattacttcgaatacgactacgggaaaccgcaagacggcgatctgttcggcgtgacggcgcagatatccgagtgcccctggaatgacgatacgaagctgctcgtcatgggcttcgccaccgatccggtcgaatacgagagcgaagacggcgcgaatctcgtgttcctcatcgacacgtcgggttcgatgagcgcgcctgacaaacttcccttgcttcaagattccttcgcacagctcaccgagagcctcaccgaaaacgacaccgtttcgatcgtcacgtactcgggaaccgagcgcgtggtgctcgagggcggttcgggagccgacaagcgcgcgatcacccgcgcggtcgaccgcctcgtcgccgacggctcaaccaacggcgaagcggggctggagcaagcttaccgcatcgctgaaaagtaccgccgggaaggaggcgtgaaccgcatcgtcatggcttcgaacggcgatctgaacgtcggaatctcatcggaaagcgagctccatgcgtacgtgagcgaaaagcggagcacgggcgtctacctctcggtactcggcttcggctccggcaattacaaagacaacaagatggaaacgctcgccaaccacggaaacggaacctaccattacatcgactgcatcgaggaagccgaaaaagtattcggaagcgacctcgcagcgaacatcatccccttagcggacgatgtgaagctgcagatcgagttcgatccggccatagtcaggggataccggctcatcgggtacgaaaaccgagcgcttgccgacgacgattttaccgacgacgcggtcgatgccgcagagatcggcacgggacatcagttcaccatcgcctacgaactcgtactgttcgattcgccccccgaatcactgccgcccagcctcgcgcgcgaagaaggcccgagcgaagatgagggtcgaattgtcgaatgcatcgatgacgaaacatggctcgtttgctccatgcggtataaaacggcgggctcgcaagaatcggtcgagcgctcatacgatatcggctcagcaagctgcactgcacagccaagcgatgactggctgttcgccgcagccgtcatcgaatgcggcatggtgttgcgggattcgaagtacgcgggtacggcgagcctgcgcgatgcgaaagcgctcctcgacgatctcgcgctcgcaagaaacgatccgaaagccgatttcgagcgcctcctacagacgctctgacagcatcgccgcaagaatttcgacgtggcttctgcgcttgcgcgttgccgttccgagcaagcagacgcttttccggtcgccgtacgcctcgaagaagcgatcgaccgatccgcgccgctcgatatcggctgcaagcaagtacggacgctcagacggacgtttcgccggtatcaggggacatgacgtgatgccatccgggcccgacgacttcccctgtggccttaacgcggatgacagcccccgaccgagtaaggtccgccaatacggtatcgacaagcatcggcagcgcttcgtagaccggcggtgtcaaaccgatcgtcagatcgagggggttcatgttctctacctgcatgccgaagcagcgcccttcggcagcgtagcccataagcgctgcggcatcgaacagatcgacgagcttcagatcgtgcaacgattgcatggctcccgagcgccgggccatgtcgtcgggctcgaattcgaagatcgtacccggcttgctgccggttccgtcaacggcgtcgacggtcacgaggtagtcgtagtcgcgtacatggggcagcatatcgaggcccatgcaccccacatcgaaaagcgttacctcgtcggggatgtcgtaagtcgccgtaagctcgtcgtataccgcagggccgatgccctcgtcgagcatgagcttgtttcccacgcagaacaccgcgatccgcttctgcggagccccgcctggcgcgaaaccgccgcccacagctacacccccgtcaacgtcggacgtatgaccagattgtaatacgccgcagccgcaatcatgatgcaccccacgacgacgcagacgattgcccagatgcgttcgcgcttgaggtattcctccttcgatacgccccgacccgccgcgcgatgcgcggccagcggctggcttacgatggcgaacgccaccgttcccgccgtcagcgttacgaagacgatcagggctatgacgatggaaagcacgctgcgctcggtaaatgccgcatagaacgtgttgtcggcgaacagccagacgggataccacagtatcgtaatccagatgccatgcgcaggtccccagatgggcggcaggaacaacgccccgatgttcagtctcggaataccctcgaggaacttctcttcttgcgcaatctgctcgtcggtcagctcggccacagtcatcacctatcgcttgaacccggatcgcgagggaatccgggacgtcttgcatcggccccattatagccaaatgcgcttgcccgccgtcccgcaccgcccagattcacggttgacggcaaagccaaagccatcgcttccccgcgcaacggactcgcgctcgcccaaactcgttaaccgttgcgtcaaaacacccgcctcgcgcctcgcgttgtgctagcatgacaggcaaacacgattcgcccgcagggcgcttgcgcgaaagaaggatatatgaaaatacttgccatcgtgggatcgctgcgcacggaaagctacaacctccagcttgcccgcgcggcgggagccgtactggcccaaaaccatcccgaggtagaatatgaactgctcgattgggccgatgtcccgctcatgaaccaagatatcgagcatcccgcgcctgaagcggttgcacgcgtgcgcgaaaaagtcaaaacagccgacggcatctggcttttcagccccgaatacaaccacttcttccccggtaccctgaaaaatctgctcgactggctctcccgtcccgtaagcgataccgaaggccaggtgctgcggggaaagcccatcgcccttgcaggtacgacgcctggcatgagcggcacctcgcatgcccaggatcacctcgttacaatgctctcgtttttgcaggccgacattatgaacgcgccgaggctcgccatcccgcacatcggacagcaaatggaaaacggcgctctctcgctatcgagctccgcatcctatctcgaaaaacaggccgccgccttcgtcggtttcatcgaacggcaccgaaaccgctaggggtccttggcggagaatcgccccgcgttgccgggccgtcgcggggcgatgcgaaacgagacccgtcatcgcagtcggcgccttatgcgcccgcccgccttgcgctcccccttgccccactccgatatcagcaggccggcacacgtcagaacgacaccgcaggctatcggggcggtcagcggctcatggagcacgataaccgaagccgccacggttatcaccgggacgaggtatatgtaggcgctcgtcttcactgcaccgagtatccttacggccagattccaggtgacgaagcaaagagccgacgccccgaagcccagaaacgccatgttggcaaccgttaccggatcggcgaagcgcgcaaacccgaactggaaccccgatccgaacagcacgggcaccatgaacagcaagccccacgcaaacgtccgcttggtcatctggatgttgtcatagccccacgagccgatcttccgcgtgatcgtcgagtacacggcccaaaccgccgccgcggcaaccgcaagcagatcgccccaacctccgcccgacagcccctgcgagctgatgagcacgatgcccgccatggcaacggcgaatccgacgaagaagcccggacgcagccgctcgtcacgtgtgacgaagaacgccagcaaagccgtgaagaacggagccaccgaaacgataacccccacgttcgaggcggtcgtgtagacaagcgcgatattctcgaacagataatacagagtcacgcccgaaaggcccgccgccgcacacagcgcctcgcgcctccacgaaccaagcttgaaacgtcgaggcctcagcgccgcaagggcgagcagcccgatgaggaaacggtagaataaaatctctatcggctggaattcgacaagcagcaccttggtggaaacgaacgtggttccccatatggcgatggttacaagcgcgagcgcatgcccgcgggactccgatgccgccatctcagcgcttttttccgctcagggcgtacgaagccctataagccccgggcgagacacccgttatgtccttgaacacccgcccgaaatgcgcctgatcggcaaatccgagcttatctgcaacctcaacggggctctcgccgccggcgagcaggctgcgcgcctcgataacgcgcagggtcagaagatagcggtagggcgttatccccttctcccgcgcgaaagcccgaatcagcgtatagcggcccatccgcccgacctgcgccatatcgtcaagcgtcatcttcgagcgaaacccctgctcgatataccgacagaccgaggcgaccgattcggattcgggcaaggcatcgggcattcccagctctcgacgccgagcggaactcgccgaaagcaaccgctcgaagaacaagtagaacggctcggcatcctccacgacgccgtcgacgtcgcccgcctcctcgcatccccgaacatggcagtcgagcgcaagggcgaacaagcccgcatcgcgaacgatcggctcgggaaacaaaggaacttgcaccccttcgcgcgaaacgccgaaatcggccagcaaggcatccataacggaagacgggatgctgaagcttcggtactcgagcttcgtcccgtccgctgattcgcacgaatggggatcgcccgggtttatgacgagaagatcgccgcttctcaaatcgtagtcgcgcccgcacaccgtcaaacgccgatttccgcccgccacgatccccaccatatagtaatcgtggaaatgactcggaaaaggctcgatcacgccgaacagcgtacagagttccaccgcaacgccgcttccgtaatcccgcagcagcacgcttcgcgcgcctgactcgatatcctgttgcacgtgattcctttctttcgtcgaacgagtataccccgatgtacggctccgttcttgaacgatattgcccgtatgtccgatcgctctgcaacggatcaaaaaagaacccggctcgcctgagccgggttccgttgtgcattcgagtgttaccgcagagagctaatgctccatgcgatcctctccgacgatcgtgtgcttctcgggatcgtacaccaatccgccgtgctctttccagaagaacatgagcagcgtgggcgaaatgccttcgatgttagccaggtagatgtggatgaacatgaagacgatgaagatgtacatcatgaaataatggatgatgcgcatcgacatgaggccgccgacgagatccgtgcctgcagcgaagaaaccgagatccatggtcggagcccacagggcgaagccggtataggccatgacgaggatcaggatcgggatcagcaagtaggagatcttctgcggaacgccgagcttggctccaagcggatgatccttcttgaggaacaggtagtacttgatccaggcaccgagctgatgacggttgtcggcctggggaagccaggttttgtagtcggcaacctgatagcgagtgccgccgtcgggcgcgctcttcacgaagaaggccatgatgacgcggacaatgcagttgatcagcagaatcgcgccgcagaacacatggacgccgcgggcaatgcccatgaacatcggccagaacgggaaatggatcgagaagccggtgatgatcaggaggatcatgcacacgaggttgatccagtgcgtaatgacgaacggcatcggatgtgcttcgcggtaatgtgcgagatgtgccatcttacttcaccccccaagggctcgtgacggtcttgaagctcttgcccgtcgcaggctcgctcacgtgcacggcgcacgcggtgcaggggtcgaagctatgcacggtacgaagcgcgttgatcggcatctcgatgtcctccacgggaacgccgatgagggcttcctccatggggccgttgttgccctgcgcgtcgtggggtgcaaggttccacgtggacgggatgatgatctggtaacccgtgatcttgccgtccttgacgtcctcgtgatgatagagggcgccgcgcggagcctcccagaagcccgttccggaaccggtgatggtttcaggcttgcggaagtactcggagtcgccgcccttgaccgcttccatcagctcctggacccattccttcatgaggcctgcgatgtagagcgtctcgatctgacgaacggcggtacggccgagcgtcgactgagcttggccgagctggatgccgagggccttggtgaaggcgtcgacctgctcgacgatgaacggcacgttgcgcttgtaggcaacgagcacgcgggaaaggccgccggcctcggcgggcttgccgtcgtatgcagggcacttcacccaggtgtagcgatcgctcaccgtgtcggtgccctctttgtagtactcggtgaactcgggctcggtaacgaagtacggcgaggtataggtctcgtcgcccttgtaccaagaatggcccatgtactcggtgatcatgctctcttcgacatcggagaggttgaggctctcgtcgagaacgccggccggcagatagcggtcgttcatttccatgttctcgttttcgaacacgccccaggcgatgtagcgacccacgcccttgccccaggtgagagcatcgacgtatgccggcgcaatcgcgagggtgtcggggatcatggtcgattcgacccagttgtaaatctcgttgacaagcgcccacaggtcgtcgagcttctcctcggtgggaacccatgcggtaccgccggggataagcgtcatgacatggggcatcttgccgccgagcagagctgcgacctcggatgccttggcctgcatctgcagagcctcaaggtagtgcgcggtgcagatgagatcgagctcgggatcgagcttgtaagcctgacccttgtcggcctcgaaccaggcgcccgagaagatggacatctgaccgttgtcggcgaacttggcgaggcgctccttcaatgcgacgaagtcgctgttggtggaagtgccggccgcgagagccaaatcgtacgcatcggcaggatcggccttgagcgcattcaggggattcacgtagtcgagtgcagccagattgtagaaccacaggatatggctgtggaggaactgggctccctcgatgaggttacggatgatgcgggcgttgttggagatcttgattccgtacgcatgctcgcccgcaatggcggatgaatgggcgtgggacacggggcacacgccgcagatgcgctgcacgatctgagcagcatcctcgggggtacggtcctgcacgacgagttccatgccgcggaagcagccgccggaaacccaagcctcggacaccttgccgttggtaacttccatctcaacgcgcaggtggccttcgattcgggtgatcggatcgatgattgaacgagtcatttactcctggcctcccttcgcgtcgccgtcatcgtacttgccgatggatttatcggggtgcttcgcatcccaagcgcgcttcttctcgaagtctgcgccgccgtccatgcggccggaaatcttcatgccgaagccgtggacgacaagagcgccggcgacgacggcggtcacgatgagcgccacggtaccgggctggaacacgaaatcgccgatgcgcagatcgcgatggcgcttgtagaacggagtgttgacctcgacccagttctgcccggggttcatcgggttagcctcgcagcatccgatgcagggagaaccagcctcgacgcaccagctacgacgatggttccaacgaacgatgccgcagttcgacttggtctgcggtccgcggcagccgagcggataaaggcaatagcccatggcttcttcgggtgagccgaactcgtacacgaattcgccgttctcgaagtggccacgacgctggcagttgtcatgaatcgtctgatcgtagatcaccgacggcttgtcctcgccgttaagggcgggaagctgctgcatgagcaccacgtcgaccagaacggcgacaagccattcggggttcgccgggcaacccggaacgttgatgacgggggtctcgacgcccgcctctttcagatactgctgcacgccgagcgcattcgaaggattcggatgcgcggccatccagccgccgttgacggcgcacgaaccgagtgcgacgaccgcgttggctttttccgccgcatggacgagaatgtcggttcccgtctcgttggcgacgcgaagggcctgaccgccccaattcttcaggacaccgccctcgtacaccaatatatagttgccagcttcgatcgtctgctctttcgcctcttccatcgaccaaccggctgcggcggaaagcgtctcgcaataattgagcgagatcatttccaaaacaactgtcgcagggtccggtgcatcggcctgggcgaacgattcggtacaacccgtgcaggatgctccttcgatccagataaccggatacaggttgcccttagttgcgccgatcacagaactctcgagggcctgggctacctgcggagcagcgagctcggtaaaaccggccgcaaccgcaacagcgccgcagagtttcatgaaatcacgacgggataccccgcgttcggatagcatttgctgaaactctgatacagtggcctctgtttccatgtgcacacctcctcaggtgctctcgtcttactactactgtcggtattttccccgaggatgaattttttgtcgtgctcggttaagccaagtgccgcttttcagccgcaaatggcatcaaaatgttacaaacctgtttactcgtaacatatatccccatctccgcataaaatgtaggatgatatgcaacgaccccgctcgaaagcagggtcgttttcgcatattcatgcagaaatctgcatcgcattcgccccgaggaaccggaacgcacgataggcgggaatcgcctagtagttttcgcagcgaatctcgaaatgcgcctgcggatgagcgcacaccgggcattcttcgggagcctcggttccaatgtggatgtgcccgcagttgttgcacttccacgcgtacacctcgccgcgcttgaacacttcgccgttgttgatgcgctcgatgagcgtgcgatagcgctcctcgtgctccttttccacgccagccacgccgtcgaacagctcagcgaggtcctcgaatccctcttcgcgagccactttcgcaaaatcagcgtacatctcggtccattcctcgttctcgcccgccgccgcatcggcaagattgtcgagcgtcgaggggatggctccgccgtgaagcgccttgaaccacagcttggcatgttcggcttcgtttttcgacgtctcgaggaaaatgttctggatctgaacgtagccgtccttcttcgcctgcgaagcgtagtactcgtacttggtgtgagcctgcgactcccccgcgaaggcgtaccagagattcttctcggtctgagatcccgaaagttccatgttctcgctcctctcgtgccgaagcctgcgcccggccgtcctggtgttccatcgtttcaaccgatgcgccgcgcatggcctcaggcgcatcgtctgtacaatgcactataaagcatcggcgacccactcggcgctgtcgtggaaatattccgataactttcccccgatgatcgcaacgcatgcacacctatggctaagatggtcaggctactgaaacgctgctgttcgcgcgaatgcgcgcatggcagcccaagaccgaaggaaccgacatgaccgaaccccaagcactcgcctaccttggacccgccggcacttacacagacgaagcggcgcgcgccttcgccgcccgcctcggcatcgacgatcccgttctcatcgagtgcacatcgttcgacgaggtgttcgacagcgtcgatcgcggcaaatgcgagttcggcgtcgtcgccaccgagaattcgctcgaaggatcggtaaccgccaccctcgacaacttcgcgttcaacagcaccgcaaacatcctcggcgagcaagtgctcgacatccatcactgcctgctgcttcatcccgaggccaaaatcgaagacgtgacgaccatcgcctcgcaccatcagggccttgcgcagtgccgtcgctacatcgccgagcacctgcccggccgcgacaccgtcaccacttcgtcaaccgcggaaagcgcgcgcctcgccgccgagaacaagaacatcgcgggcatcgccaacgcgttcgccgcgaagctctacggcgccgcgatctacgcgcaagacatcgaggaccacttcggcaaccaaacgtcgttcgcgctgatcgcgcggcagggccacgcaccggtgttcgaaggaacgaagcacaagacatctgttgcgctgttcatgcagatcgaccgggcgggcacgctctcgatgatcctttcggagttcgcctacgcgggcatcaacctcacgatgatccaatcgcgcccgacgaagcaggcgctcggcgactacatgttcttcgtcacgttcgagcgccccaccaccgatcccgaggtgcaaacggcgctcaactgcctccgtttgaagctgcgcgaagtgaaggtgctcggaagctacccgattctctaagccggccgtcgcccaagcatccgacaggaagaatatcccaaaaaatacgaacggatgtttcacgtgaaacatccgttctgtttttctgcccgcacgctcgaaagcgccgccgcctacccgagaaagcccagatgctcgagcaggatcttaagaccgatcaggataagcacgatgccgcccgctatggtggcgggcttgcggaagcgcgacccgaactggttacccgtcgcgactccgatgaacgaaagcacgaacgtggttaccgcaatcgtaagagccgcccacacgatgtcgacccgcaagaaggcgaacgtgatgccgacggcaagcgcatctatgctcgtcgccaccgcaagcatcacaagctccttgacgtcgaggcgcgcctgctcgccttcggtgactattgcagcgcttttgctacaccgttccacgctccactgctacagcgctccatggcagactgccacaccctaacaatctaaattgccacgcgccccgaaaggggcgcttccttttccgccacaattccgatgggcacaaaagtgcccatcggaccattgcgagaaaggaagaaaaaatggtcaagtacagagaaatacttcggcaaagggcgatgggggtgagtgtcaggaacacagcgttctcgtgcaggtgctccaccgcaacggtaagggcggtgaccacccgcgcgaaggcgcacggcctcgagtggcccttgccggaggagatgaacgatgcggcgattcgagccgtcatctatccggcaaaggagcgatccgatatgtcgaaggcggagatcgaccatccccgcatcgacaaggagatgaaccgtcccggcatgaccatgctgacgctttggagggagtactgcgaggacgccctggcatcgggcatggaaccctacctgtactccgccttctgccagaagcaccgcgcctgggcggccgccaacaaggtctccatgcgcatcgagcgcaaacccgcccaggagatgcaggtcgactacgtcggcgacaccatggaggtgctcgacgccgacaccggcgaggcgcgcaaagtctacgtcttcgtggcgtgcttgccctattcgggcgagatgttcgccgagggcgcctacaacatgagagcggagtcctgggtcgaggcccacgtccacgccttcgccttcttcggcggcagcgtgccgatagtggttcccgacaacctcaagcagggcgtcgtcaagaacaccgtcgaagagctcgtgatcaacgagcagtaccgcaggatggccgagtactacgggtgcgccgtcgtgcccgcgcgccccaggaggccgagggacaagggggcggtggagatgagcgtgagggtcatcgagcagcgcgccatcgcgccccttcgcaaccagctgttcacctctctccggcagctgaacgaggctcttttggagaaggtgcgcgagatcaacgcccgtccgttccagaagcgcgagggcagcagggatgaggtcttcgtccgccaagagaagccgctgctcatcccgctgccgggcaagccctacgagatggttacccgcaaggttgtcactgttaattttaactaccacgtctcgtttgacggatgctggtactcggttccgttcagctacgtcaagcgcgaggtggagctatgcgccaccagatccgctgtttgggtggcctgcgacggcgagcgaatcgccatgcacgagcgcatctacggccctaggggaagctaccgcaccaaccccgaccacatgcccgattcccatcgcgactttgtggagtgggacgcgaagcgcttccgtaaatgggcggccgggatcggcccgtcctgcggggaagccgtcgatgccatcttgaggtcgcgcaagatcgagcagcagtcctaccgctcgtgccgcgcggtgctggcgctcgcgaagaagcacggaagggagatgctcgagcaggcgtgcgccaaggcctgctctctaacgcccaggccgagctacaagacgatcaaatcgattatctcggagatgggggccgcagggcccgaggaccaaaacgccggagcgtatctgcgcggaggcgactactaccggaacttgagcgagggggacgatgaataatgacggcgagccagacgacgatggacaaactctatggcatgaggatgtcggtgatggcgcaagcgtatcgcgaccaggaggaatcgcaaggagtggcagagatgaccttcgacgagaggttcgccatgatagtcgatgccgaatgggacgcgcgccgcatcaacaggaggacgaggctgttgcgccaggccggcttctccgatcccgaggcgaacattgccgatgtccgctacgacgcggatcgcaagctcgaccgcacgaaactgatagagctgtccaactgcacatggataagaggccaccgcaacgtcgtgatcacgggcgcgtcgggcgccggcaagagctggattgcctgcgcgctcggggtggcggcctgcaacgccttcttcagcgtaaggtacgtccggttgcccgaaatgctcgacgagctgaacgtgagcaagaacgaggattggctcaaggcgaagaagcgctacacgaaatgcgacttgctgatactggacgattggcttttggaaaagctcgaggggaaggcggcgcgcgagcttttagagatagtcgaggcgcgcttgcgcagcgggtccttattgatttgctcgcagttctcgccagcaggctggcattcaaagctcggggaaggagcaatcgcagatgccgtcatcgaccgcatagtctatcggtcggacgtcatccatattgaaggcgacgagtcaatgcgcaagcgcatcggctaagagcataaccggccgtattggccaagaggggcgcttgcgcgcccctcgcaatcagagcaacccgcattgctacgtggcagtctgccatggaacgctgtagcagtggagcgtggaacggtgtagcaaaaacggcgcaataagcattcggcgcattcgacgcactcgtcatcctcatggaaggcgtcccacagcatcttcgcaccgatgaatgccagcaaaacgaatgcgatccagtggtctatgctcgtgatgtagccctcgaactgcgtgccgagcgcccagccgatcacgggcatgatcccctggaaagccccgaagaacaatgcgatgacaagcgcatgcttccagttgagcttgctcatcccaagccccttgcataccgaaacggcaaacgcgtccatcgacaatccaatggcgatgagcgccaattccacgaaccccatgggtttctcctctcgcttgcagccccgccggcctccgcgctgcgggcgcaaaaaaaccggcgcatcgcaccggccataaaaaaacggtgcgacctctcgtcacaccgcaagtcttgtcaattaaggccagccagcttctcgaaaaagcagtatgttgacatggccgcagctatttcgccgccgactactcccctacgggtttcgggtatcctaccacataacgcggcctacgcgaagagaacttccccctcgcgcctgaaaaacccttcgccaaccatatccgcaagaatggattcgaattccgctcggtccattccgcaccgccccgcctcgcgttcgaactcctcgagatgcgcgagcagatcgtcaggggccatacccggatcggcgagcacgcatctgagcatctctgcacgcttctggcgcctcgatccctcgaaagcgctctgcttcgcgtaatgcgcgcttctgcgcgaaggattgaccgtcgtctgcttgaggtgcgcgccccaatcgagcagggcgtagtaccacgcacggggccgatcgggcgggcacgtggcctcgaccaaaggcttgagctcgcgatcggacacggtttccgcatcgggaaacagctcatggatgaaaacggttcgaacgttcgtctcgatgtacaccgaaggcttgttatgcgcgaaggccatgacacccgctgcggtggcctgcccgatgcccggcagctcgacaagctcgtcgaaagtggggggaagttcgcccgcataccgctcggcgcactgctctgcagcgcgtttcagggcgagggcgcggcgattatagccgagaccctgccactgctcgagcaccagcgccgtatcggccgaggccagggcatcgatcgtcggaaaaacgcccagaaagcgatcccaatgcttgagcacgcgaaccacctgggtttgctgcagcatgacctcgtagacgagcacgctgtaagcgtcgtcgatgttgcgccagggaagctcgcggtaacgcgaacccccctcagcccaaacgcgctcgacgaagcgttcgagttcgcgctcgcttacatcgcatccgctttccatcaccgagccggtcctccgctaaaccgcttcgacgcgatcggtggcttcggattcggcggcggaaccgcccgaagaggcgatccgctgcgtgcacgtccatttctcgtactggccctcgggtcccagcacctcgatgatcttcgggtgctcgtcgcctagggtgaggatatcggagagggtgaacgacgcgaaataatcgttcagaagcttgtcggctccctgccacacgcgattgtacgcgcagccgccctgcttctcgcaatactcgggatcgacggagcacaaagcgacgctcaccggcccctggaccgcctcgagcacatcgagcagcgtcacttcggcgggatcgcagttaagcaccagcccgccccgcgcgccgcggaccgtcttgatgaggccgcctttcacgaggtcgtgctgaatgctgcgcgcaaacgcatacggtatgtcctctttctcggaaatctccgagaccgaaacgtactgttcgccgctctcgaacgcagcgcggagaatacggcacgcgtaatcgcagcgtcgtgttacatccatcggttagtcccccatcccattcagaaggtcgtcaatccggtcaatctgagcacggaaatcttcgattacagcatcttcgagctgtcggtactcttcggaatcgagcggctggtaggccgcaagcttctcaaacatgttgtcggccgttaccggcatgtagcggcgagcgaccaggctcgccttgtacgcatcctcgaccgcttcgcgagcggccatgtagatgtcgaatcgcgacatacccgccgaataccgcacaagcgcggaccgatcgatggaacgcatcgacggatgctccgatgcgatccgtatccacagatcggcacgctccgaaggcgaagggtcgtcgatgtcgaccaccgtcaccggatcgagcagatcgtagaagaacccgtcgatttctccgtcgcctcccgcggaggcgagcacgtacacttcgggattctccaccgccgaacggatgaggttgatagcttcgcgcgctccgcgcgacagctgggcgtatgcgaacatgcccatctcgtcggagccggcatcggcaagcggggatccccacagatcgacgtcctcaagcaccaggatgccgccgccctcgaaagcgttcttcgcagcgttgagcttcggttggttgtcggcctgcgccatgacgcacagcacgggcatgccctgcaggttctcctccatgtgcatgcggatggcgggcagcccgatttctccgagcgtggccgacatgaactggttcgcatcctcgcgcacgggcgcgcggaacaggtaggtgtcgatgatgggcatcttcttgaggccgtggcggacgttgagcgtctcgacgagctcttggaactgagggtcgtcctgcatgcccacaccgaagccgttcatcgtcttgacggcgtcccgaaaccccacgatatcgcgatacgtgagcttctcgatgtattcggcattcgaaacggaagcagccttgccctcggccttttccgaaagctgcggctcttcccccgccttctcaatggccttacgctcctctttgcggaaaggcatgagggagggggctcccgtctcgcggtgctcgaccttcatcatgaacggagccgacgagaggccgaggaaatcctgcgagatcatatcggtcatatcctcgagatcttcgcgcgtgagcccgaactcttcgagtttatcgagggcgaggcgctgcagctgctcggcgcactccgcgacctcgtcgggggtcatgtacggctcgagcttctcgaagatgtattccgccaaagagcgttctttgagcttgcaggcaagacgccatgcttggcgcagcccgtcgattgccgcatcgttgggcatgtaggcgccgtgcgtcgccttctcgaaggccgctaagtagaggtgcatgcccaaaacggcatcgcccgctgcgcacgcttgggcggcgcggcgcaggtattctgccgccgtgttgttcgtatcgttgttctggcttggtgagctgttcgtatccgcatcgttttcaaacatcgtctctcaccccttttcgctcgcgtatcttgtacggttcataaatgtgtaagttcgggtatcattttagtatgtccgcgccgaacgcatacggtaaagatcgtattatgcagaaatcgtcacacaaccgaaaggagaccatcgcttcctgcacgcatatcgcttccagctatatataatatattacagtatagtgcaaccccaggaaacacggtcagttccaatcgagaatctcccagccttttcgccgcgcggcgcgtgccagcggcttatcgggcgtaaccgcgtaggcgtgcttcgccgaagagagcagcgcgcaatcggaatggtgatccccgtatgcgtatccgagctcccaattcccctcgccgtaacgctcgtcggcatagcggcggatggcggcgatcttctcttcaccctcgaccggcagaccctcaacctcgcacgtatagcagcccgcttcgtcaacgcgcattcgcgtcgaaacctgatgggagaaccggtggaactccatcgcgcgtagaatgatcggctcgaacgtggccgagacgatcacaacgtcgtgaccggcagccgcatgggcggccatcgtctcgtcggcttgcttgcgaaaacgacgatcgaccttctcgtcgtaaaacgtgcgcatgaacgcgtccgcatcctcgcgccgcatgccgagaaacgccctgaacaccagtccccgcacccagctttcgttctggggcaggcgcagcttgtaagccgccgcccacaaaaggatcctgagcaccacgctgttttcgagcatgtcgtgctgcatcaggtaacggacgagcataaccggcgaattgcccgagatgctcgtgccgtcgaaatcgaacaccgcaagctgaacgggagtgcccgccgcctgaacggtgccatcggccggctctggcgtttcgagcgccgcagctggacagccgtcctcgcttgcagcgcatacgcgcatctgatccgacgatattgccggatcagatgcgctttcttcatttcgagtatctgccatgccccagtctctacggtttgattcgacgcgtaaaggatcgcaggcatgcgcgggcgcgcggcctagtcctccacttcgtcgatgcagtcaacgaactgtgaattatacagctccgagtaaaaaccgccaagtgcgagcaattcctcatgggttccctgctccacgatatcgccgtcgcggatcacgaggatgagatcggcgtttttgatggtggagagccgatgcgcgatcacgaacgatgtgcgaccccgcatgaggttgtccatcgccttctggatgcgctcttcggttcgcgtatcgaccgagctcgtcgcctcgtccaagatgagcatgcggcggttcgcaagaatcgcccgcgcgatcgtgagcagctggcgctgaccttggctaatgttgctcgcatcctcgttgatctccatgtcgtagccgcctggctgcgtctggatgaagtgatgcgcgtaagccgccttggccgcagcctccacctcctcgtcggtcgcgttgagatcgccgtagcggatattctcgcggatcgtgcctttgaacagccatgtatcctgcagaaccatgccgaacatcgagcgcagatcgtcccgcgcgaaatcgcggatatcgtatccgccgatgcggatcgaacctgaattcacatcgtagaagcgcatgagcagcttcaccatggtggttttgcccgcgccggtgggtccgacaagcgcgacggtttgaccctcggtcaccttcgccgagaaatcgttgatgacgatcttgtcgggcgaataaccgaagcgcacatggtcgaactcgaccttgcactcgacctcttccgacttgaccttcacatcgtcgcgcgcctcctcgggttcctcgaggaattcgaacacgcgctcggcggcagcggccatctgctggagcacgttggacacctgcgtcagctgcgtgatgggctgcgtgaagttcttcacgtactggatgaacgcctggatatcgccgaccgtgatgacgccctgcacggcaaggaagctgcccgcaacggccacggcgacgtagccgagattgcccacaaacgtcatgatcggcatcataagacccgagatgaactgcgatttccaggccgattcgtagagcttgtcgttcgtcgcgtcgaagcgcgtcgccgcagcatcttcctgattgaacgccttcacgatggcatggcccgaaaacgtttcctcaacctgtccgttgatcgcaccgagcgttttctgctgagccttgaagtaaccctggcttcgcttgaccaccaccatgatgaggacgatggagatgggcaccatgaccacggttatgagcgtcatgagcgggttgatcgagagcatcatgacgaacacgccgatgatggtcgtgatcgaggtgatgagctgcgtaacgccctggttgaggctctggccgagcgtgtccacatcgttggtgatgcgcgaaagcgtatcccccaccgagttcttctcgaagtaccccatgggcatgcggtcgatcttctcggatatgcgcttgcgcataagatagctcgtccgctgcgagacggagctcatcatccaaccctgcacgaaagagcacagagccgagagcagatacaggccgagcgtgaacatcagaatccgcgcgatcgcatcgaagtcgatgccgccggttcccgcaatcttcgccccgatgccgttgaacagctcggtcgtagccgtggagaggaccttcggccccacgatgttgaaaatggtggaaccgatggcgaacacgaacacgatgactatcgcaaccttgaagttgcccatgaatttgagcatcttcaaaagcgtgcccttgagatccttcggcttctctcccgccatcatcgctccggggccgtgatggcctccgccaaatccgcgccgaggcggtcgcttcgtttcttccgcgctcatgcggcatcacctcctcccagttcagcagccgagagctgcgacagagcaatctcccgatacggctcgcaatcggccatgagctcctcgtgcgtgcccttcccgacgacctttccctcgtcgaggactatgatctgatcggccgaaagcaccgtcgagatgcgctgggccacgatgacgaccgtcgcttcgccaagctggttatgaagcgcctggcgcagatcggcgtcggtcttgtagtcgagcgccgagaagctgtcgtcgaacaagaacgcgcgggcatcggtcgcaagggcgcgcgcaatggcgagcctttggcgctgcccgcccgaaacgttggtgccgccttgggatatctcgctttggaatccgtcttccttcgattcgatgaaatcgcttgcctgggcgatggaggcggcgaattcgatgcggtcttcggacatgccctcatccgaatacgcgatgttcgaagccacggttcccgagaacagaaacgccttctggggaacgtagccgagcatgctgcggagcttttcctgagaaagctcgcgcacgtcgacgccatcgatggtgatcgacccgctcgtaacgtcgtagaagcgctctatgagctttacgaccgtcgatttgccggaaccggtcgacccgatgatggcggtcgtctttccgggttcagcggtgaagtcgacgtgttcgagcacgcactccttcgaatcggcgtacttgaagcacacgtcgttgaacgcgatgcgcgcaccgcccgcaggctcgattctcccatcctcgctcgacgagggatcgcagatcgtcggttcggtttcgagcacctcgttcacgcgctgggcggcgacatcggcgcgcggcagcatgatcgagatcatgccgatcatcagaaacgacatgataatgaccatcgaatacgtgatgaacgcaatcatatcgccggtctgtatggtgccggcatcgatgtaggaaccgccgacccgcacgatgagaaccgagatgccgttcatcacgagcatcatcacgggcatcatgaaggtcatgacgcgattcgtaaacagctgggttttcatgagcttcgtgctcgcgtcgtcgaagcgctcctcttcgaactgctggcgatcgaaggcacggatgaccggcagccccgtaagtatctcgcgcgatacgaggttcacccgatcgatgagcttctgcatgatcttgaacttgggcatggccaccaccatgagaacggcgacgagtatgccgatgatgaccaccgcaactacgatgatccagctcatggcgagattggtctgcgataccatgatgatgccgccgatggcgagtatcggcgaatacagcaccatgcgcagcagcatgaccgttaccatctgaatctgctggatatcgttggtgcccctcgtgataagcgatgcagccgagaagctctgaacctctgcgtccgagaacgagatgaccttcttgaacagccgtccgcgaaggctgcggcctatcttggccgcggttcgcgaggcgatgaggccgatgaatatggccgccaccatgccgagcgctgcaaggccgagcatgatcgcgccgatgcgcagcaggtaattcatctgcatggcgcccatatcgtagccaagctcctcgtactcgccgatagcagcttggatggcctgctgctcgaccagggaatcgcccacttcgcccatcttcgctttcgcctcgtcgaccatttcgagaagctggtctttggtgaccgcgcccgaatcgtaggcagccttgagctgcgcgatatcgaaatcggggatctggccggcgtaatggatggaaacaaggggcatggccatgatcgaatcgagcttttcgatttcacttcttcccgtgtcgttgagccggtatgttccctgatcgctttcggtgtaggcagcgcggaccttcgcctcgtcttccgcaggcaagagcatgcagacttcgtcgaacgtatcggcgcgcatctcgtcgagtgcaacgtgttcgacgcccgattgctggattccaacatcgacgatatgcgatgtataacgcggaagcgagaggtcggtaaacgcctgcactaccagcaggagcacaaccagcaaaaccgcgagcttggaatccttgagataacggattattcgcatgggtatccttttcgaatcgtaagtttcgtcttgtctatcgtttcgtgcgcgggcaatgatgatcgacgcgttcgatctttcccgcctccgcttgtttttcatggaagtcgagtatcttgtgcaaggtggcgaccatgtggtcgatatcctcgatccccacgtattcgaccatttccgtcaggtgctgttcgcgcatctcatcggccttctgcgctatctcgtagccccgttcggtcaattcgagcgagacggcccggaaatcgtcgctgacgcgatggcgctcgacgtatcctttttcctcgagcagcttgagcgtctgggagagcgcactcggcgtcatatgcatgcgctcggccagaaagcgcggctgcacgatcggctcgccctcttcccgagccgtatagatgccaacgaccacacgcgactccgtgaaggtcagcccttcgggcgtgaggaacggaacgtacgcccctttcctgaaccgcctcatgatctcgagcagaccctgcttcgtctctttcggtaaaccagccattgcgcgcccttctcatatttcgcaagcatgcggtgggcatcgccgagctccaatgcccaccgcatgccaatacaatttagcttctaaacattatcactccttaattgttttgcaacatcaccgcgacgtcgtaagaaatctttcacagttcgcacacgcgattgcggcgaaaggccgcaaagaagaggatgaaattacgggtaaagcgcctttcggcgggaacggcgcccgcccgaggcgcgattcggcctgcgccgcgaagtccagggccctggcactgaaaaagcctcccgaaggaggcttttcaaaaatttaaatggcgggatgtacgagactcgaactcgcgacctccgacgtgacaggccggcgctctaaccaactgagctaacaccccgtgctttcgcagcgaaggatatattactggtaaaccgaggcgcgcgcaatacccaattttaaaaactttgcgcactcgaacctctctccacggaaacgctgcatcccagtacacgaaccgatgcgctttccgacagcaggccgcacagcacgcatggcaggacggaccgaacgcaatgcggtacctgctgcgccgcctgcgcgcgacgacggcgcaggcgctacaccgcccgctgctcgacgcgcgtgatggaaagcgcgtagatgccagaatcgccgtcaagcatgttcgccagcagcacatcagggcgaaggcttccggtcggctttgcatgcagggtgaacacgaggatgttcttgttctgatcgatctcccccaccaagaattcggcgggatcgagaatcttttccttctttttgcgcaccaccgtaatttcatcgggcacatccaggtgctccggggtatcggaaagcacgacgcgatacgtgcttatcggataagcgaccgaagctgccaaatcgcgcgatccgatatattcgcacgaggtcaccatgagatcgggcacgcttgcctccatgagcgcatcagccaccttctcgggagcgatgtagcgcgtcatctgcaaatcgaagcactcgcgcgtaccgccgacgccgacgggcagtgcagcgccgaaggcgatcttcatgtggggcgaaaatccctgcgagatcgcatagggaagccccgcgcgtcgcacggcgcgctcgagggcgcgagcaacctcgagatgcgaaagcatcgcgcaacggccgcttttgcggaagtatacgcgcaggcggaagttcgacggatcaggcatggcgaacctccctcgtcacgatatcggcatcgagaacagggcaggcgccgcacgccgtacaggacgcaaacgagcagtcgggcgtggtttcttccctatcggcgcgcttccgttcgagccgcatgaacgcattgctgacaccggtcgatacatggctccatggcatcacataggatagatcgcaggtgcgctgcgccaccgatacgggatcgaacccaagctcgtcggacgccgcatcccacgccgcctgcgaaaaactctccgaccaggcgtcgaaacgcgcaccatgctcccatgcccgctcgacccaatcggcgcattcgcggcctcccctgctcataaccgcctctatgaagctcgtcgagggatcgtgccagtgcacgtcgaccgcacggtacttgaccgacgagcgcagaagattcacgcggcgcatcgcctcttcgggcgcaatctgcccgtcccactgaaacggcgtctgcgccttgggaacgaagagcgcgcacgatacgctcatgcgcacgtgcccgcgctgctcgggcggcaccgctgctttcgcacggtcgtaggcgcgctgcgcgaggcttgcaatgcccttgatgtcgtcatcggtctcggtgggaagcccgatcatgaagtagagcttgcagcgccgccaccccgcagagaacgccgcgtcgatggcgctgaacagatcgtcttcggtgacgtttttattgatcacgttgcgcagccgttgcgttcccgcctcgggcgcgaaggtaaggccgcccttcttctgccccgccacaaggcccgccatgtcgacgccgaacgagtcgaggcgctgcgacgggatggaaatcctgatgcccttgccctcgcaggcgcggttgaggcgcgtgaggatttcggcgatctgcgaatggtcggtcgatgaaagcgatgtcaggctcacttcgtcgtaacccgtttcctcaaggccctttatcaccgactcgacgatattgtcggccgaacgctcgcgcacagggcgatacatcatgcccgcctggcagaaacggcacccgcgcgtgcagccgcgcaggatttcaacgttgagccgatcgtgcaccgcttcggtaaacggaactatgcacggctcccaagcagagctgtcggagaatccgtcgaacaggcgcttgacgaacgtcgtcggaagaccctcgcgtttcgggcgaatccacgaacccgttctctgcgcctcgtcttccgaaacccaatcatagagcgaaggcacgtagcaccccggaagctcggcgagcctgacgagaatctcgcttctcgaagcgccctgctccctgagcgagcggtgcaaagcgagcatctcgggaaccgactcctcgccttccccgatggagaaagcgtcgaagaaaggggcgtacggttcggggttgaaggcgcaggggccgcccgcaaacacaagcggatccccctcgctgcgatcgctcgatcgcagcgggatgcccgcaagatcaagcgtttcgagcacgttggttgccgcaagctcgtgcggcaacgtgatgcccaccgcatcgaactccgaaagaggcgcacagctctcgagggaaaagagcgggagctctttttgccgcatcagatcgcagaactcgggggcgggcagaaacgcgcgctcggcagccatgccatcgcattcgttcacggcgttgcacagaatgcgaaccgcctggttcgcctgtccgagctcgtaggtatcgggatacaccatgcagaagcgatacggttcgtccggtttgtacgtgcagccccattcgtggttgatgtagcgtgccggacgctcggcatcgccaagcagcgccgccaggcgcggccagaggtcggtcatgcgcgcgagccccttccgaaacggttcgacaccgaagcgctcaatcggttcgcagcgctcgtcaccgctttcgcggcgggcttcggaaccgctcccgcagaagcggcggcgcccaccgccgatgccgcaaccgaggaggcagcgggaacggcgttgctcgccgcggcactggccgcatggcccaccttcgctgcggcagccctggccgctgcagcaacgctcggctgtttgcgagcggaatcggcaaccaaaaccaccttgtcgcgcgcacggcccaccacttcggcgagatggtcgatcttgccgtcgccctcgaagtattcgatggcggcccgccccatggcaacagtgccgctgtacccgatagcagccttgatcgcccagccgagagccggaacgaaagcgacgagctggcgggcgacggcacggcacgcgaaagctccaccgaccaccgccgcaagctccttgacgcgctcgacggccatgggctggccgtacgcagccgcaatctgcagcagcatcttcgcctggttgagcgtcatgatgggaagatcggcgcccggcagtatcaccacaaggccgatgccggcgttttgcacggccgtcgcgttgacggcctcgagcgaaagcggcttgcgcacgaaccggaacgcaagggcgaaggcaaggcgcttctcacggcacgcctcgatgacccactcccccatacgcttgttgagggaaagcgcgccgtcgatcgtcagagaatacggctcgttcgcgcttcccgcctgttcgggcagcgcgagcacgtcatcgatggcaggcgcaaccagatcgtcttccaaaatgggatgcccgctcgcctcggcgatttcagccgcaagcccgggaagcgtcgtcacgaccatgacgggaacgcccgccgcgcgaatgtcggccgcataggcgccgacatgctcgtcaagccccgccacgatcaccgccatatcggcatcgggcgccgcaaccacggggaaactcgggaagtacaccatgcttacgcgagcatgcgcgctcgcgcttgcgaacgcctggcgcacgtgagcctgcacatcgccaggtgccgtctcgtccatgtagatgctcaccgaaatcggcgtggcgcgggcctcgtcgatgttggtagcctcgtcgatgacggctttgatatccacggggatctgcatagtgcctcctatctagcggccgttatgggcccacacggacccgatgagcccgaggagcatgaagttcatcaccatgcccgtcgatccgtagctcataaacggcaggggtatgcctgtaatcggcatgagaccgagtgtcatgccgatgttttcaagaatttggaacaaccacatgccgacgacgcacatgacgataaccgtcccgaacaaatcggacgcggagccggcaattcggaagcatagcaaaacgagtgcggcgtagagcgcaagcagcaccattacaccgaaaaacccgagttgttctgccaagacgcagaatatgaaatcggtcggcgcctcgggcaggaagccgagcgtcgcctgcgtcgcgttgaacagccctttgccgaacaggccacccgacccgatggcgacctgcgcctgcttgagattccatccctcgtcggaaaggttcacgctgtcgtgttcgagaaacacgagcaggcggttgcgctgatactgcttgagcagcttgtactcgcctgtcgtatcgaagatcacctgatcgacggcgaacacggccgcaatggcggcaatgcccgcgacaagcgtgatcaggaggaacttcggccgagccccgccgaccacgagcgcgaccgccgtgatgaaaaggtacacgaggccggttccgagatcgggctgcgtcatgatgcagagaaacggcacgagcatgatgccgagcgctttgaggtactcgcgaacatcgtcgagccttccgccgtaacgcgagacgacgcttgcggctagcaggataacggtgatcttggcgaactcgccgggctgcacctgtatgccgaccttgatccacgattgggcgcccatgcccgcatcggtgccgagaccgggaatgtggggcgaaagaatgagcgcgacgctgacgactagaagaaccgtcgtgaaatcggaaaggttgcggtagtcgaagcgcgcgatgacgatcatgatcacagcgcctatggcaacgcaggcaagctggcgtgagaagctgtaatccgcgttaccgagcaccgccgtatagacgatgatcaaaccgtatcccacaagcagggaaacgacgatgaggaacggcaggttgatatacttgaagcgacggggtttcgtggcgtcgacgacggctctgtcgggcgctttgaccgattgtatttgcggcaactgaggcatcggcgctcctagtccgttcttcccgagccgtcgctcttaagcggcagcggtatgtacttgcccgacgatgcggcgatgacgcccacggtcgggtcgagctcgccggcgtcggccgcaaggacggtcgccatgatctcaacgccgagcggtgcggcgacttcgctgcctcccccgccgtggttcacctggcaggcaaccacgtacttcggatcgtcgaagggggcgtagcatacgaaccaggccgattcgttcttgccgtcggagtactccgccgtacccgttttagccgccgcatcgatgccgtgctcgccgaacagctttgccacgctctcgttttcggttgcaacgccatggagcgcgtctcgcatgacctcgagattctcgggaggcacgtcgggcacccccatgatctcgggctcgtacgaaacaactacttcacccgaagagttgcgggcttccttgaacaggtggggccgcatgaggttgccggtcgcaatcgcgccgtaggcaacggccacctgcagcggcgtgacgagcacgtcgccctggccgatgaccatgttggtaagatcgccgcccatccactgctgcgcttcgggcacatccgcccaatgctcggctttccattggggcgtcgggatgcgtcccgccgcttcggaggggatgtcgatacccgtcgtttttccgaacccgtacttttccacgtactcctgcatggcggtatcgctgatcgtgcctccctgcgaggcgcccgcctgaaagaagctcttgccaatctcgtaaaacaccgtatcgcatgactccacaatgccttccctgaagccaatggccccatggccggttcgcaaccagcacttctggggagcgcccgtattgaaaccgtcccacgagcccgtgcaatcccagcttctgcctgtatcggcgaacccgtacgcgagtccggcaaggcccgtgaacgccttgaacgtcgaagccgccgcgtagttccccgcgatcacgcggttgagaagcggctggaattccgaatcctgagtgtacaggctccacatatcctccccgatgccgccgacgaacacctcgggcgaataggtgggatagcttgccatcgcaacgatggcaccatcgcgcacgtccatgacgacggccgaagccgaatctcctttgccggttccgatcgtgccgtcagtgggcgccacgagatcggcgagcatctgatcgatcttgtactggacgggcgctttgatggtgaggtagatatcgttgcccttctcgggatcggtttcgctcactacccgctgaaccgaaccgtcggcagcggcgaccagcacgcgttggccgtgcgtgccggcaagcaagcgctcgtagcccgcctccacgcccgatttgcccaccacatcgcccatttcgagctctgcaccgtcgatcggggtctcgaggtctttgtcgtcggcggtgctggcatagccgagggcatgggcggcaagtgcaccccatggatactcgcgcaccgaacgctcctgcgtggttacgccgggaaaagcctccaaatgctcggatatataggcgatgccgcgaagatcgacatcgcttgcgaccacgcgttggctctgcgcgccggtcttggcatcttggatgcggtagcgcacgatgttatggggaatgcccaaaaccgcagacaggcgctgcacgaccgtgcggtcgtcggctacctccacatcggccagcaccgtcaaggatttgcggttgcgcacgagttcgatgccatcggcatcgtagatgtagccgcgaggcgccggcgtcgaaacggtcttgtactggttctcgtctgcttcctggcgatactgcccggcattgaccacctgcaaatcccaggccttcacggcaagcgatccgaatatgcccgccgcaagcacgcccatggcgatgaagcgggacttaagcgtttcgcccaggttggtcgcagaggtctgcggcgcgttgacccgcgcatcggcgcgtcccctgccaccctgtcgcccaccgactccgacggtgccgatggagcgaacgtccatgcgcttgctcgaagccttgggggatttcgttcggtttcgcacggtgaacgccacgacgagcgcgatgacgagcacgacgatggtgacgatggttgcaatgatcgctgctaacatggccggccccgatcatcgacgcttcgacttcgacggcggtcccacaagagggcccgccgtcggagcagcggtcgatttgacgatgcggcccgcagatgcggcggcgcccgacttgacgatgcggccagcagagggaacggcgccccccaaaggcgattcggagacgacgaaccgcagtgcaagcgggtagaagacaagcgcggcaacgcaatcgtagagcgcacagggaagagcgcgctgcaaaaacgccgcgcccacccccgataccagcccgaggccggagaggatcatcgtatagagcagttcgatggcaagcatcgacaccacaagaatcacgatcggcatgaacagcgattcgttgtcgaggatcatgaaggcccgcgacgccgcaaacgcagccagcacgaacagcagcgccatagctcccacggggccgaagccgatcaagtcgtagacgagccccaatgcgaatgcgaggacgagcgtcgaattcgccggccgcacgatggcgaccgtaaggacataagctgccgggaaattcggcatggcagaggcgattgcgatgttcggcgcgatgacaagctgggcaagtaccgctatcacggcgccaacgatcaccgcaagagtatcacgattcattgccggcatctccttccgggtcggttgaagacggatcttccccgcttccgtctcctccatcatccccagaagtccccgcactccccgaagcgtcggaaccgcccgctccgttcgatccggcggcgttggagccagacgccgaagcgcccgcctgcgcattgggatctttgaacgtgctcgatgccgccccctcggactgcatgctcaaaacgacgagcacttcctgcaaaagacctccatcgccgctttgggctaccaccgcgcgcatcgtcgatccgctcgcattgcgctcgactttcgtaaccgtgcctatcacaaggcccttgaaatagctgccgccgatgcccgatgttataacgacgtcgccctcgttcaccatcgcatccgccgccatatcctcgaaatacaggacgccttcgaccgagccgcgaacgatgccctcgatattgccggatcgcaccatggcggaagccccgctttgcgcatcctgtacgagacgcaccttcgccgtttcggaggtcgtcgaaacgaccatgccgaccaaacccgcctggcccatgacaggcatgccgcttttcagcccatcgtcggaacctcggtctatcgtgatcgaccgctcccattcgctggagctccggccgatcacgcgggctccgagcgattcgaagccgtatgcctcctgcgcgtcgacaagggcctgaaggcgctccgactcctgcatgtactcctcgagccgagccacccgctcgcgaagctcttggttttcggcccgcaagccgctgagcgatgaggccgacgacgcatcgccgtcggattccgcctcctcggcgctcggcgcattcgcgccttcggactgcgcgcctatgacgacatggacatcctgcatcagagcgacctcgccgttcggcgccacggttgcgcggacggtcgcgccgttcgcgttcttctcaacgccggtaaccgtgccgatgatgatgccccgcgccgccatgccgtcaagacccgacgacacgatcacgtcgccttcctccaccgtcgcatcggacgccatgttctcgaagtgcagcgctcccccaatggagccgcgcacggacccctcgacccggctcgattgaaccatggccgaaacggagctctgcgcgtccttcaccagacggacgtccgccgtcgacgccgtcgtcgagacgacggtgccgacaagacccgattgccccgttacggcatagccgctttcgatgccggcatccgaacccttgtcgatcgtgacgatctgattccaagcatcggcgcttcttccgatcacgcgggccccgaccgatgccgagccgtagacgtcgcgcaagtcgagcacctcttgcagcgcctggtcttcctgcacgtaccgttcgagctgcccggtgcgctcggagagctcaaggttctgttcgcgcaaggcctccctggccgattcggatgcggtcgcatcgccgatggcggtgcctgccgacgagatgagcgagccgccgaacgagccgacgaacttgaatggcgcgacgatgcccgacacggcgttctgcacggagtgcatcgtgccgtcctcatcctcccacgcatagagaaccacgcaggcgagcgagagcgctaaaagaacaatcagcagcacagggccgccgattgaaaaaggttttctctgctggttgagagccacgaggtgcgtcgcaccgccttatttcgatcgcataagggtttgtttgagggcagtcggggtctcaagcaccttcaggcatccggtaacgacgttggtgagggccgtttcgctcacccaaacgggaatctcgagcttatcggtcaagtagcggtcgaggcccgaaagcaggccgccgccgcccgtaagcaaaatgccgttctgaatgatatccgacgcaaggtcgggattcgttttcttgaacgtttccttgatgtgcacgaccatctcgtcgatgggcgcctgcaatgcggcgcgcacgtcttccgattggatcgtgacttccttgggctgttcggttaccacatcctgccccgaaatgatcatgtcgcgctcgcgcccgtcctcgaacgggaggatggagccgatcttgatcttgatgacctcggccgtgcgctcgccgatcttgatgcccagcagatcgcgcagatgcacggcgatcgcctcgtccatgcggttgcccgccagacgcagagacgacgacgttacgatgccgccgagcgagataaccgccacctcggtggttccgccgccgatgtcgacgaccatggagcccgtcggttcggtcaccggaagatcggcgcccatcgccgcagccatgggctcctcgataaggtacgcctgtcgagcaccggcctggatggccgcctcgaaaacggcgcgcttctcaacggacgtcgcaccgcacggaatgcagatgacgatacgcggcttggcctgccatgggtacttgcgcgccgacgccttgctgatgaacgccgacagcatggcttcggtcacatcgtaatcggcgatcacgccgtcgcgcagcggatgctccgccgaaaacgcgtcgggcgtatggttgatcatgttcttcgcttcgtggccgaccgctaaaacgcgatgcgtgctcttctcgatggcaacaaccgagggctcgttgataacgataccctcgccctttatagcgaccagcgtattggcagtcccgaggtcgatggccatgtcggacgacatctggcccccgaaccccgaaaacatatcgaaaatggacataaaggctaacccctttatcaacttcaaacatgcgaacctgcattttaacacaggggtcgatgcgcaggcgaaaatccacaggcggtacatgctgcgattgaatcaggcgaacgcgaacggggtctttgcccatctgggcaaagaccccgcaatcatcccgcttcggaacagatgctaatgcacgctgcaggacaggcacggatcgtatgcccgcacgagcttttctatctcgagcctgatcgcatcctcagaacgcccctcgcctgcgagtttttccgcaagcaggcgcatatccgcttcgaggttcgcgacgttttgagcggtcggcgtcatgatagaagcgcgcacgaccctgccctttccatcaagcgtgagatcatggaacagcgcgccgcgaggagcttcggtgaacccgacgccgcgcccggctttcacctcgaacgcaaccggagagctcgaccccggtatctcatcggcggcgagtttgcgacagatgcccgcgcatcggtcgagcgcatcgacgagctcgaccgcctgcgcgacgttgttcatgaaagggttcagctcgggcgggcggaggcccgctttcgcagcggcgactttcgctcgcgaactcagatgcgcccacgacgcgttgattcgggcaagcgccgcggtcatgtaaggggagcccgtctcgcggacccgcgcgaacaatgcacccgagtggggcacggcgtattcctcgatgcactcgtcgacatcgttcgcatcgaactcgatgcccgccttgaggaagcgcgcggtatcggcgcactcgatcggataatagccttccataaccatggccagcatgtcgccgtcggtagcgatgtcgggaacctcgaaagaatcgaacagatcgaccgtcttgagcacgaacgggatcatcgactccatcttgtcggcaagctcgaggtattcgcccgcaccgatctcatgggtgaacccgccgacgaccgccgtaatgggatgaacgctcctgccgcccaccttcgtgcagagctcgtttccgagcgccttcagggcaagagcctgctcgaagagcgccggatcgctttcagccagcgggaacacgcttggcaggcccacgaaatcgggagccgcgaacacgaacagatgcgtcgcatggttctgcagatacgatccgtagataagcagctcgcgcagcgcgcgggtccgctcggtcggctcgaccccgaagatgcgctcgatggccttgagatcggtgaccacgtgacttgcagagcagatgccgcagatgcgcgacgagatgtaggacacctcggagtacgagcggccccgcaccatgctttcgaacaagcgagccggttcgacgacgttcatctcgactgtttccacggcaccgtctttgatgaccacgtgcacgttgccgtggccctcgacgcgggcgatatgatcgacctgtattgaggttttcgtcattgctgcctagtccttcgctttcaagacgggattcgtctggttgaacatctcgagcgccttgtcgaacgcctcgaccgacacgccgtagcgagccaccgactcgcgcgccgattcaaggttcgcatcgggcgagatgccccggcacccgttgcacgggcgtcccaaattcacgcagcgcgcgccgcaaccggccagcgtcacgaggccgaggcacagcgtgccctcgccgtagaagcagcccgtttcgttgcgcttgcaatctccgcacatcgtgcgagtcgtctgcgtcgcgttcgatccgtacaaggcgcgggtaagcgtctcgatgaactcgaacgggtcgatcggacaacacggcacacgatactcgacgtcgatgacgctcggtaccgatcgcggggctatcataccgccgcacgcctcgggaacctcgtcgtacacctcggtcggacgcatgaggtgatgagccgccgccatgccgggaatgcccgccgtgttggcgcacgcccctatggcgatgaccgccttggctttcgcgcgcagctcgcgcacgagcgcctcggattcttcggtggtgaccgcgccctcgatgatggcaacgtcgaagccgtccggcatcggctcgctcgaagcaagctgccagtaggtgagatctatctgcccgagcacgtcgagcagatgggattcgacgttggttatttgcagctggcagccgaagcagctggccaagcccacgattaccacgcggggcggcgtgggcttctcgtcgcaggctatgcagttagcgcacatattacatcgacccctggatattcttcgcttcccaataattgaacaccggcccgtcgatgcagacgtactggtgtccgatctggcagtggccgcacttgcccatgccgcacttcatgtgacgctcgaagctcacgtagatatgatcgtagctgatgcctttcttgcgcatctcgtcgatgacgaaacgatacatcaccggcggaccgcaaatggcaccgaacgtattgccggcgtcgagttcgagatgctcgaacggcttggtcacaaggcccacttccccatcccatgtgtcgtcgggcacatcgacggtcaggtacaggtcgaaatccttgcgatggcgccacatctcgaactgatcgcgaaacatcacttcgctcgggttcttcgccccgtagatgatcgtaaccttgccgaactcgctgcgctcgtcgtggatgttgttgatgagcgaacgcaaaggcgcgatgccgaggccgcccgcaacgcagaggatgtcgtgacccttcatctcctcgaagggaaagccgcgtccgaacgggccgcgcagtccgacgatatcgccgcactgcatcttgtggagcacttcggtgaactcgccggtgcgccgcacgcacagctcgatgaaaccctgctttgagggcgatcccgagatggagatgggcgcctcgcccacaccgaagatgctcacctcgacgaactgcccgggctcgtggcgaaacgcctcgcggacccgctcgtcgatgaggcggaactcgaagagcttctcggtgggcgtgatctcgatgatcgaggtgatgcgcgcaggccagggcctgtagggattcgccgccatcatctcttcgcccgtcagaggccgcgcatagtcggaaacgggagatacatggacggtgttcgccgcacagctattcgccatcttcggcccccttcctctcgaagaacttgagcacctcgatcgggttgatgttggccttgcacgctttcacgcacctgccgcagcccacgcagagcatgcgatcgtggttggcaagaaatccgttgagcttgtgatacatccgatgacgcacgcgattgcgcccgttttcgcggaagttgtgaccgcctgcgaccagcgcgaactgaggagccgtgcaagcatcccaggtgcgctcgcgcctgccggtcttcccactgggatcgagcgtgtcgcggatgtcgaagcaaaagcacgtggggcacaccgccgaacacgccgtgcacgaaaggcaccggccgccgagctcttcccaatacggatccttatggaaggcgtccatgagcatggcgacttcctggatatcggggacatcgcggttgaagctttcctggcgcttgcgggtggcgtgacggaattcgatgcggtcctcgtcggttgccacgcgcgggttgcacgcggcctcgaggatgttcgccgcctcgacgctcgatatgctcacgaggtatttgccgccgatatcctgcaagaacagatcgtagccgaaacgcgcctcatcgctgccccacaggtcgcagaagcagtgttcgcctggcatgcaggagatccccacgatcagcgttgcctcgcgacgggcagtgtagtacggatcggggtatttgccgtctttgaacacgaggtcaaggcggttgatggcattgatgtcgcacgcgtgcgccccgaagatgacgcgcggcgttatctcgacggtgtaatcggtcacctcgtttacggtcgcatcgaattcgaacagcgtctccgtctgcggaagaaagtactttttcggcgagacgatcgtcgtatcgtaatcgagtgctatctcatcggggctttcgatcgcatcaaacacgtagccccggcctcgcttgaccggagctacgacttcatacgaatccatgaaagcctgaatgagtgagggaagctctgtcgcgtcgataacacgatatagcatgcacctgctcctcttctttcaaaacccgtttatggataaacggtcccatctgcgcaggtccgattggcttatgcgaagaaaatgcccatctcgcgctcagccgactcgggcgagtcagaaccatgaatgacattttcgtccataacaaggccgaaatcgccgcgaatcgtgccgggggccgcatccgcgggattagtggcacccatgagcgaacggcatttcgccacggcgccgtcgccggagatgatcatcttgacgaccgggcccgacgtgatgtattcgataaggccgttgtagaacggcttgccctcatgctcggcgtagtttgcagccgcctgctcgggggtcaccatgccgagctccatgcgctcgaccgcaaggccagcgcgctcgaagcggttgacgatctcgccgatatgcttgttcttcacgccatcgggcttgatcatgatgtaggtcttctgtactgccatgttcttcctttcgaatgatgcttcgggctttcgttcacacgacgcggttccccggcgtcgcaagactatgggatcaggcgagacggcggagacgcccgcacacggcggccccgcctttccgttactggttttgagatgcgaaatacagctcgacgttggaaatcttccagccgatggcatcgcgcacaagcgatacctcgtactgcacatcgccgccttcggctgttttagccgtcacgtaggcggtcgactcgctcatggatttgttgatgccgtcgatggttgcacctgaatcctgcgtgaccagggcgaccatggattgcaccttttcttcgctcaaatccttcgcaaacgccgatgacgatgcggccgaaggatcggcgaacagctcttcgatcacggtttcctggctcgggaagccgtatccctgcgtaaacaggaacacgcccgccgcaaggacgatcaggatgagcgcgatgaagaacacgaggatcttcaaaccgacgttgcggcgcttgcgatcctgtttggcaaggcccttcgaccactgctcgagctcttcgtcgctcgcgttgaagaagcgatcgtcgggcgcataaccgggcatcacttcggcaccgtagggctgctcgttgtaatagtaggcatcctgcggggcggcgccgtaggcatacgggtcgtcgacgggatatgcaggcgttccgtcggcgggaacgtcgagtcccgacatgtccgcgccgatcggcgacatgatggcagtcatctcggaggtgccgcttgcaacctggccgaccgcgcgctggtaatcgacgttggccgaatcgctcaggaaataagtcttgtcggcaagagccgattcgaaagccgtaaccgccttttgcatctgcccgcaggcgacatacgcctggccgaggtttgcgaacagcttgttcttcgttgccgcaggcatgtcgaactgcaaagcgctctcgtaggatgtcaccgcgtcggcaggacggtcgagagccatgaagcagatgccgaggttcagaagcgctttcgtcggatcggggttgccctcgtcgagcgcggcttggcgaaacgctacgccggcttcagccgatttgccgagcttgagaagcgcgcttcccatcgcggaatacgctttgtacggggtgtcgtacttggcatcggaaacagagatttcgaaatgcctgaccgcatcctcgtaatcatggagagcggcatatgccatgccaaggttgtagttgaccgcgccaaccgcgtcgtacgtcgaatcggcagtcgcctgggtgtaggcatgaagagcttcgttgtagtcatccagcttgacaaggcagttgcctatctgatggtacagaaggcccatctcccccggcgccagcggatggctgacatcctgcaaacactgagtgtaggcgccgagcgccgcctcgtagttcttggaggcgtacgcagatcgagcttgctggaaaatctggttgttcatctgcttcctttgagtgtcgtttgttcgagccgccgagcaagccggtcttacgcgttggcgttctcgatttcgatgccctcgatcacatcgcccacacgcagctgagcgatgacgtctttgccttcgatggtctgcccgaacacggtgtagcccgagtcgagcgaatgttgcggcccgaggcacagatagaactgcgaccctgcggagttcggatcctgagagcgggccatggcaagcgcgccatcctcatggacgttgttggggttggtggagaactcctctttgatggaatagccggggttgcccgtgccaagtcccgcaaacgggtttccctcggcggctttcacctgatcggtatccagatcgcgcgttttggggcatccgccctgaatcacgaagccgggaacgtaacggtggaatttcaggttgtcgtaaaagcccttctgcgcaagctcgacgaaattgcccacatgaatcggagcatccttacccgcaagctggacgcggatatcgcccttggatgttttgatgacggcgatctcctcgcctgagggctgatactcgggagtatataacgccatggtatggctccttctcacatcgcttcggtccatgcgcgaacgataccccgtatcggacgcaagaccttggatttcaacatacacgaaaggagattctagcaggtaagtgcagaacctgtccaaaaaccttgcatttcgacttcaaaaccacacccgatcttgaggcaaaaggttttggctaggcgcaaggaggtgcttcggatgagcccttctcccgaaaaatcgcctggaaatggcggtcaaggcacgcttccgtcgaaaaaacgcgccgtttcagacgttttcgagcgccccttggcggctcggcatttcgcgacctgcgcaaacgtcggcaagcgttcaggcagaacgctgcgaagacgacggaagcttgcattggccgccatgcgagtgcgcttttgcgggtgaagaacccagatgttcgcaaaggagcgagaaagttgaactggtgcccttgacaggattcgaacctgcggctttctgctccggaggcagacgctctatcccctgagctacaagggcacgagaccagattatacgctattatgtcccaatcataaaaacaagttttagagaattcacaggaccccatggaagaattgattcgcatcgagcgactgagtttcggcaaggatgccatcgggcatcgggcggacggtaaaaccgtcttcgtcgacggaggcgtaccgggcgatgcgctgcgggtgaccatcgacgaggagaagccgaacttctgccttgcccatatcgtcgaggtggtcgaagcatcccccgaccgcgtgcaggcgccgtgcgtctacgcagggatatgcggaggatgtccctggcagcacatcgcgtatgccgcacagcttgaggcaaagcgcgccaacgtggtttcggcactcgtgcgcacggcgcacttcaatgaccaagcggccgaagagctcgtatccgcctgcctgccgagcaaacgggagatgggctatcgcaataaaatcgagcttggcgccacccgcgataaagcagggcgcttcgaactcggttttcgcaaaggcgaatcgcacgatctcgccatcgtcgattcctgccccgtcgcccacgaagctctcgccaaagctccaaaggcgctgcggggagcgcttcgctacctccagcgctccgaggacctcggcatcttccgcgtgggcatccgtcacagcttgcgcacccacgatttggaaatcgcgctctggacggctccgggaccgtttccccgcaaggcggtcgcaactacgcttgaaagcgccctcaagacaacaagcgtagtcagagtcatggccgatccgggcaaaacacgcaagatcaaaggggtcgaagcgctcagcggaaagggcttttgggaagaggagcttgcgggaagtcggttcaaaacgagcgccccttcgttcttccaggttaacaccgcccaggccgaaaaactcgtcgcaaccgtcatcgacggactcggcgatctcgacgaagccgtcgtcgccgatctgtacgcgggaggcggtacgttttcgattccccttgccgaagcgggagccgacgtgctcgccgtggaatcggcatcgtcgtcggtgaaggacctgcggcgcaacgccgatgcgaacgacgtgtacgtcgaggtcatcggaggcgatagcgcccgcgagctgccgctgctcggcgagctcgatgcgcttgtggtcgatccgccgcgtgcgggcctcgccaaaggcgtagccgaaagcattgccgaggctgcgcctgcacgcattgcatacgtgagctgcgacgccgccacgtgggcgcgcgatgtcgcgcgcttccaagccgtcggctacaaacccgttcgcgtacagccgatagacctcttcccgcagacctaccacaccgaaatcgcaagcatcttcgagcgccgaagctagggatcggcgctcgaaaaacgccgaccttcgaccatgcgcccgcagcgaacattatggcagactgattaacgcagtcgtagtacaatcgaggctcgaataaaaccgaagggatttccatgttcgagcaagcccgccttgaagatctgaccgcattccagttcggccatgcacaatgcgccgaaacagcaacgggatgcactgtcgtcgtcgccccgaacggcgccacatgcgccgtcgacgtgcgcggcggaggacccgctacgcgcgagaccgacctgttgaaacccgagaacatgatcgaggcggtacatgccgtcgtcttgtcgggaggatcggcgttcggcctcgaagcgagttcgggggcgatggatgcgctctcgtctcgggacatcggatttcccgtggaaacggcgcgggtgccaatcgtcgtgggagcatgcctgttcgacctccttgtgggaaagcccggccaccccgacaaagcgatgggccgaaaggcagtcgaggcggcgctgcaaggcgaaccgttcggggaaggcaacgtgggggccggcacgggtgcaaccgtcggcaagctgctcgggggcgaccgtgccatgaaatcaggcttcggaatcgccgcggttcgcttcggcgaaatcatcgtagcggcaatcgtcgccgtcaacgcgctcggcaacatccgtgccgacgacggcacgtggcttgcaggctgtcgcgacaagagcggctcgatcatggatgggggtgccgcattcgagcttgccgcgcagaggatggcggcacaagccgcttccgaaagcgccagcgcatcgggaccgtgcaccaacacgacgatcggcgccgtcatcaccaacgcacgcctctcgaaagcacaggcaaccaaggtttcctcgacgtgccacgatgcctacgcgcgcgccatcaagcccgtccacacgtccaacgacggcgacacgattttcacgttcgcctcaggcgaggccgaagcgaacaccgatcttgtggcaatcatgggaaccgaggccatgcagcaggcgatataccgggcagtttcgcaagccgaatcggcgtacggacttcccgcgctgcgggatctcgcgtaaggggtgcctgtggattcgcacaagatcagaaaccgcgcgctgttcttagcagcggtcgttttcaccggagcccttgccggtgcgttcgtatgggctttcttctttctcatgaacatcgggttgaacttcatctggaagacgcttcccgaaaagacgggtttcgctttcttcccgcttgtggtctgcatcgtcggcggcctcgtcatcggcctgtacgaaaagcggttcggcccctaccccgaagatctcaattcggtcatgaagaaggtaaaggaaaacggccgctacgagtacagcgatatcggcgtatcatcggtcgccgcactgctgccgcttctattcggcgggagcatcggacccgaagcgggccttaccggagccatcgccggattgtgcacctgggtcggcgatcgcatgaagcggttcggttcggatttcaaaaaccttacctcgatcggcacctcggcggcactttcggctatctttaccgctccgctgttcggatttgcggcgcccatctacggaagctgcgaggacaaccaggacgacgacgtgctcgtcttgccgaaaacatcgaagatcgtcgtgtatttatgcgccatagcgggcgccctcggagcgttcatggggctcggcgcgctcttcggcgggggcatggggcttccccgtttcaccgacatatccatcggagctgtcgagctcgtctggctgctgcccatcacgctggtcggtgcggcgggtggatggctctaccatctgttcgaccgcttctcgcttggcttcagcacgctgctcggcgacaggcccgttgtcaaagcggttatcggcggtgcggtgctcgcatcttgcggaatggtgcttcccttcacgatgttcgccggagaaagccaggtccacaccctgagcggaatttggatgacgatgccggctctcgtgttgctgctgaccggcttcgcaaagctgttcaccacgccgttctgcatccgcaccggatggcgcggcgggcacttcttcccagtcatcttttcggggatctccatcggctacggctgcgcgatgctcaccggcgccgatcccgttttctgcctttgcgcctgcacagcagcggtatgcgggggcgtcatgcgccagccgcttatggcagtgctgctgctgttcctctgcttcccggtgaagggcgtggtcgtcatgctcgtgggggcgatcatcggatcggcgattcccctgccgggatttttgaagcccgatcccgaaatcgacaacctgaaaccgtcttcgctgaaaacggactgactggaaaggcccttgccgactagcccgcgggccaagccgataccggcttggcccgcctcggcgcggctccatcggcgcagcgatcgacggatccgcgcttcgcgctgcgaaaagaaagcttctacgcttcgccctgcgcctgcgcccgtttctgcccgagaagctttgcgatgcgctcggaatattcgacatcgacaagacccgcttcagcagcgagatcgataaccggcgcgtcgttccacagcgcttcgaggcggtagtactcgcgcgtctcgggctgaaacacatgcacgacgaaattgccgtagtcgagcagcgcccataagccatcggtcgttccctcccgatgcagcggcttcacgttcgcctgcacgcgttcctgctcttcgatctcgtcgataatggcatcaacctgacggccgttcgccgccgtcgcgatcacgaaataatcggtcacggatatgaggtctttgacctcctgcaccataatgtcggtcgccttcttctcgtcggcggcgcgcgctgcgataagagcgcactccttagcggtcggcgtttgcgtcacttgcttcctttcctcggatccgcatgctgcggcctatctctcacgtcgcgcgatcgctcgacgtaataattccatacgctgacggtgtcgggatgcatcctgcgtttcttctcgaccaaaaaggcgatcacatgctgaaacgtagccaggaaaagctcttcgaggctcgcctcgcctattcgatcccttatggccgccatgccgtcgaacggcctgagcggctcgatggcatcggcggtatacactatcatatcaagatcggtcataccgacctcggccgacgtatgccgggctatcgcctgcaaaacatcatctccgatctcgggatactcccgagccagatcgagcgcggcagtcggtccgtgaagaaggcggggcatgctgtcgagcacgacggggttcgccttaacgcccagatccctcgcgcgcgctcgcgcctcgtcgtcggaataatccttgtcccaatcatggagaagccccgcaaggcgggctttccgctcatcgacgccgtaggctcgcgcaaggcgcacggccatatcggatacgctgagcgaatgctcgtagcgcttgcggtcgagccgctctttcaggcgctttctcgcctgctcgtagaactcgtccgtcaacgatccgtccgtcacgcgaacctcccttcacgatcgaatgcacatccagtatcggctaaaccgatgattcctgcaagcgcgcttggagcacggtcccaagaggaaaccgaaccgttgccatcgttcattcccgatggtcaccgaacgcatcttgcgaaggagaagggacttcgatggattctatgacatcgatcatctcctgcctgctgtcgacgcccagcttttgatatatgcgagtgatgtgggttttaaccgtgcttcgggcgatgtagagccgctctgcgatatggggaacgcttctgcccctgacaagcagactcagcacctcggcttcgcgcatcgacagcgaatagtcttcgattgccttctcgcattggcgagcaaagacgatcacttccgcacgcggatagtcgatatcgggattcaaatggtcccgttcgaatatccctttcttttccagaagaaacgaagcggccaaaacgacgatgcaggcaatcacgaacatgtagatcagtatgttctcttctatgttcaaaacgctttgcgctgcaaaaatgatcccgagtgcaaagaggggcacgccgctttcgactgcgcggcaccagccgaaagccctgatgggatttaccgacgtttttccagatgcgtcggcgatcatgacaaagcagaataaatcgaagcaagtatagcccaccgacaccaatgccggtccgatgctccgctcgaagctgaaggcgattatcagaccgaccccgatcatgaccacgggaaataccagcttgtaaatgtaagaaagagagaacgtggacctgagaaccaaagatgtccccagaagcaacgcgacgatgagaaaactgccgagggcgacgaacatgccaagcggctcgccatacccaagttttgcctgtgaattgagaatgacgatccacgtaacaactccgaacagatagaacacgaggagaacccgccatgtctgggagacgaacgaccgaagaccattggacaatggcggtttttgcggcgcagcctcgaaacgcttcacccgaaaaagcagagccatcgacgcaggaagcagcagcgcgataaggacaaccctcagaaatctcgcagtcgcgtcaacagccaaatatgcaacgcaggcgacgagaaaggatgccaaggtgtaagcagttatacgaagaggcccgagcgcgctgaattccgatccccacatgacgatcacgcaggctgcgcacacgcgactgatgccccgataggcaagcaaagcctcctccccgtaagcaggaaggccaaccgatagaaaaaatgcgagaacgcagcaagcgcccgcaacgaacgaggctgcgagagcgatgaatttaagccttttcgtccgaaaaaggaataccgcaatcgctatatagcccaaaacattgcatagagacgacacaagcgtggggatccacacgatcgtctcaacgccgctcgttgcgccggttatgggctgagcatatatgtcagtcaggttccacgcgtagaaaagggcaagaccgacaatgtagacaaaggagtttccgctgatgaaaacctcgcgaaatcccattcctaccttttggcggacatcggtattcgcagatttggccgttttgtaggatgccaacacacacactcgctttctatactcgccgagtcctgaagtcagggcgggggcgatgcgaaacgactacttcttcaacacaaaaagtatagcatcggtcgcatcgcccctcacatcaaacacgaggaagggatgctaaaaaatgaaagagcaaaccaagtctgcatcgcgcgagacaagcgaagtcaaaatctctcgccgaagcttcatcggagcagccgccgtcacggccgccgcactcgcaggaggcatggccggatgcgcgaaccagcccgcatccggctccggccaatcggcatcgcagagccagggtgatgcggcgcccggttcaggcgaaggcgaaacgctgctccccaaccccgaggggctcgagttcaccaagcctcaaggcgccgcagttgcattcgaatcacaagaaatcgatgccggcgaaatcaaggaaaccatcgactgcgatgttgtcatctgcggtgccggaatctcgggagcgaccgctgctgcatccgctgcgcaaaatggactcagcgtcgtagtcctggagaaaggatcctcctttgcagcacgtggaaccgaaataggggcaataggcgaccgcgcgcataaagaagcgggcatcgaactcgacggcaacgcgtttctggaggacgcaatggcgacagcgcacttcaggtgcgaccgcaatgtctggaaaaaatggatcgatcgatccggcgaagctcttgattggggaatggacaccgttggggatgcttgtggaaaattcttctgcgcgaaccagaactcggtgtttgccggagtaaccacctggggatcgggcgtacggctcgaaaacggcatctcctccttcgtcgaggcaatgctggaaaacgctcagagcaacggagcggacattcgttatcaaacccccgcatgcaagctcgtgcgaaacgatgagggcgtcgtaagcggcgttatcgcaaagacggacgacggatacatccaagtgaacggatcgcggggcgtcgtgctcgccaccggtggatacgaatacaactgggacatgatgacgcaaacgattcgcccgcgcgatcttgcagtttacgcctggatcaacccgacgctcacgaacactggagacggacatctcatggggctcgatatcggagccgcagaagacgattacccccacattctcatgaacgaccccgctggcgcaaaaacgggaaaccgggccaacggagcgatgcttgccttccttcgcgtcaacgagaacggcgagcggttcgtcaacgagaacctctccttcgagtacatgtcgaatgccatcatgtaccaaccgggagcccacggatacgtcatcatgtcaggcgatatcctaacagcgctcgaaaaagccaaaggaggagccccctggacgcccgaggacatgtacgactcgattaaagaggtgctcatagaggccgattcgcttgaagagcttgctgaaaaatgcgggatcaactacgagaatttcgaaaagaccatcgcccgttacaacgagctatgcgaaattggggaagacgtggatttcgggaagaatccgaccgcgctgcttccagtgaacgagggtccgtactacgcagtggacgagagcggatgctgtctcgttagcgtcaacggcctcaggacgaatgccgaagcccaggttatcggcatcgacggtgcaatcattccgaacctgtacgctctcggcaacgcaagcggcagcatgttctatggaacctatccgcatcatttgagcgccgtaagccacgggcgatgcgttacctggggctatctcgtggggcgcgaactcgcgggcgtcgagtagcgaaccctgttggaaaaccgtacgggaaccgcttttcagcggttccccttccctgcccggtttccgtcattcgccgtacagtccgcgctcgtttacatagtcgaacacgccctgcatagtgaggtagcgaatcgatttaccggctcttacacgcgctcgcaaatcgctcgatgagatggcgagcgccgtgatctcggtgtaagacaccgagaaatccgactgctcggcgagaaaccgcttcttctcttcggaaagcgcataacccggcctcgtaacgccgatgagcttggcaagcttggcgatagccgagctctcgcgccacttcacgatgctgaacacggcatcggcacccgtgatgaagtacagctcgacgttttccggatagtgcgcccgcagctgcctgagcgtatcgacggtgtacgtatccccgccgcgttcgatctcgatcgcactcgcatcgaacgctggattgcttcgcacggcaagacggcacatcgcgagcctgtcggctgcgtcggtcacccgctgatcgcgtttgaacacggggtttcccgcaggcacgaagatcacggcatcaagggagtaggcctctcgcacctgctcggcacaggccagatgcccaatgtggatgggatcgaacgtgccgcccatgataccgagccgatacgttctgcccggatcgtcaagtccaagcccgtcgaagcgctccgatacgaccgccatgctacatccgcacctgccctgaaccgcgaagtacgtatttatacgaggtcagcgcctcaagcgcaaacggtccgcgcgcatgcagcttctgggtagagatgccgatctcggcgcccatgccgaactctcccccgtcggtgaacgcagtcgatgcgttcacgtatacggcagccgcatcgacccctgcgacgaagcggcccgccgcgccatcgtcgctcgcaacgatggcttcggaatgcttcgttccgtagcggtttatgtgctcgatagcctcatcgatgccgtcaacgcacttcacggctatctcgggggcaaggtactcggtagcccaatcctcgtcggtcgcccggacgaaattcaactcgatgcccgtacggccgctttcatcccgcgtccaaatcgcgcaatcgtacgcctcttcgtcgcagtgcatcaacacgccttcatgcgccagcgcgctgagcatcccgggcaaaaacgaccgggctatcgagcgatcgacaagcagcgtctcggccgcattgcacacgccgtaacggcggcacttcgcattgagaacaatagcgcacgccatgtcttcatcagccgatgcgtggacgtacacgtggcagtttcccgtacccgtctctataaccggcactttggaatgctcgacgcaatgccggatgagacccgcgccgccgcgaggaatcagcacatcgacgattccatgcaaagccatgagctcgtcggttgcggaacggtcagtggtttcgagcgcgcgaatgcagttcctcggcatgccaacgccaaccgccgcctcgtgaagcaagcgcgctatgaccgcgttagagcgcgccgcaagggatccgccgcgcagcacgcaggcattgcccgttttgatgcagatgcccgcagcatccgccgtcacgttcggccgagcctcgtaaaccatagcaaccacgccaagcggcacgctcacgcggtcgagttcgatgccgttgtacagttcgcggtgcacctgcaccgttccaagggggtcgggaagcaccatgaggtcttcgagcgccgccgccatggcctctacgcggctctcatcgagcatgaggcggtcgagcaggctttcggccgtgcccgccctgcgcgccgcctccatatcgaggctgttttcggctacgatttcaggtgcacgcgcgcgcagagcctgcgccatggcggcaagcgcctgattccgcttttcgcccgtcgtcgttcccaattcccgagaagccgccttcgccgccaaggcgatcgcgcgcaccgattccgtcgattccattcgttcggtcattcgaacaccaccaattcgtctcgatgaacaactggtttgcgggaaagcccctcaaggagccgattggccctgagcgcctgttgcgaaagaccgcgggcaagctcgagctcgtcgctcgaggcggaaacctttccccgcgcgaacaggtgtcccgcacgatccttgatatccacgatatcgcccgactcgaagctcccctcgacatcggcgatgcccacgggaagcagcgaacccccttttgcgatgagcgcggttttcgcgcccgtatcgacgataagcgcgccccgcgccgaatcgccaagcgcgatccagagtttcttgggagtgatctcgtggggttttcccgctgcaagaaaacgcgtgcccacctgtttttcagcaacgatatcgacgagcacatcgggtgtgcggccgttgcagataaccatctgtatacccgccaccatgagtacgcgcgcggcttttatcttggttatcatgccgccgctgccgacggtcgtgcccgcttcgcccgctacagacataatcgattcgtcgatcttctcgacgcgcgatatcagttgggcatcagggttgaagtgcggattcgcatcgtagagtccgtcgatatcggacaggatgaccatgaggtccgcatccaccaaacacgccaccagcgcagcaagcgtatcgttatcgccgaagcggatctgctcgaccgaaaccgtgtcgttctcgttcacgatgggaacgacttcaagctcgagcaagcgagaaagcgtatcgcgcgcatggaggtacgccgttcggtcggccgtgtcgcgacgcgtgagcagcacgatcgaggtcgtgatgccgtagggtttgaatgcttcggcgtacgcggtcgaaagcacgctctgccccaccgaggctgaagcctgcaggctcggcatatcgctcggcctgcgcttgatgccgagcgcttcgaggccgcaggcgatcgctgccgacgtcaccacgatgggctgccagccaagcgcgcgcacccgtgcaatctgatcgacgagcgcacccatgaacttgtaatctatagaactctcgctggtcgtcagcgtggacgaaccgatttttatgacgatcttcctactcacgcgaaccgcatccctacagatcgaggtctttgtatatatcctcggccgtctgcgccgattcgaattcaaacgaacgcccgacgatgcggatttcgtcgccgtcgaccgcacctgcccgctcaagggccttctcgacgccggctcgcttgagccgatgctgcagaaacgcgatggcctcgtcgttctcccaatcggtctgaacgaccatgcgctcgatcatcgggccctgtactcggaagatgccgtcagacagcttcgcgacttcgaagcgcttgtcgcgctcctcgcgcttgtgctcccaaacgtggtcgtattgaatttcgcctgcaagctcctcgcgggccgcttcgcgcaattcgtgcaccttggcagcgatggccgccttgagctgatcgacgccctcgccggtcaacgcgctgatgcggtacagcttcgggtcgatggggcttggtgcgaactcgtcgccatcggcagccgcaaccgagtcggccttcacctgagcggcgagcctttctgccgcttcctcggtaccttcaacgtcgatcttgttcgccacgacgatacgggggcggcaggccagctcatcggcgtagagcgcaagctcctcgttgatgatgcggtaatcttcgagcggatcgcgcttttcgtaatcgcccgttaaatcgaccacgtggacgataagcgccgtgcgttcgatgtggcgcaaaaactcgtggcccaggcccttgccctcatgcgcaccctcgatcaggccgggaatatcggctacgacgaaactgtaatcgccgctgcgggcgaccccgaggttcggcacaagcgtagtgaaaggatagtctgcgatcttaggcttggctgcgctcatcttcgaaatgagcgacgatttgcccgcagagggcatgcccacaagcgctgcgtcggccatgagcttcatctcgagctcgatccagccttcctgcgccggttcgccgagctcggcgaacgccggtgcgcggcgcgtaggcgtgacgaaatgtatgttgccgcgaccgcccacgccgccctgggcgacgacaacccgttcgccgtcatgggtcagatcggcgatcagctcgccggtttcgcgggtgtcttcgaaatattcgcgcacgacggtgccgatcggcaccttgagcaccagatcatcgccgttggcgccgtgcatcctcgaccccttgccgtgcgttccgcgcgtcgctttgaaatgatgcttgaaacggtagtcgatgagcgaggatacggcggcgtccgcctcgatgacgacgttgcctccatgcccgccgtcgccgccgtcggggcctcctttgggaacatgggcctcgcggcgaaacgacatgcatccggcaccgccgttgccggcctttacgaatactcgtactttatcgatgaacatgggctttgctactcccttggatgcgctcgcgggttcctgctttggttttacccattgtatatgaaaatgccccctgccaagcagggggcgaaaagtacacggttaatgtacgctgtcgaggcgctttacgcgctcggacggacgtgcaccttacggcgattgcccttggtgaactcgacggtgccgtcgcacagggcgaacagggtgtcgtctttgccgcggcctacgttttcaccaggatgaaaatgggtgccgcgctgacggacgatgatgttgccagtggtcacaacctcgccgccgaacttcttgacgcccaggcgctgcgcgtgcgaatcacggccgttgcgggtagatcctagacctttcttatgtgccatgtcgaatcctcctccctcggttactcggcgtcttcagacttggcggcagccttcttcgctgccggtttcttttcggcagcaggcttctcggccgcttcgtccttcttggctgcagtcttcttggctgcaggtttcttctcagcggtagccgctttggaagcgggcttcttctccgccgcctcgacctttgccgccgtctttttctctgcggcgggcttctcctcggccttcttggcgggagcgtccttcttcgcagcaggcttgccggccttgacctcagcctttgcagaaccgacgaccgcaatctgaatacgggtcaggttttggcgatggccgcgcatcttcttgtagttcttgcgcttcttgaacttgaagacgagctgtttttcgcccttgaactgctcgagcacaacggcctcgaccttggtcttggcagccttggcaggatcagcctcgaccttgtcgccgtcaacgatgcagatggcctcgagctcgacctttttgcccggttcgacttcgagtttctcaacttccagaatgtctccgggagcaactttgtattgctttccaccggttttcacaatagcgtacattagttatttctccttgaaatgtgtcaaaacgcaaggcgatatcttatcagccgtctacgcccaagtcaataaaacgatctgcatttattccgaagacccacaaaactgcgaaaacgaaacgaagatcggctccgttcggcttcgaaatcggccgacaagcgctcgccaccctgagagcgccccctatcataccagttgggcgcacgggagcaacgccagaaagccagcagcacaatatggacacgccggcacagatcgacgcaccttttctgcaaccatctcagtgagcctcggcccagttgtccccgtacgagatgtcgacatcgagcggaaccctgagatcagcagcgccctccatgatctcgcgcaccatatccgacagcgcctctatctcgtcttcgggtaccgaaaagtccagttcgtcgtgcacctgcaaaaggagcttcgcctggaaaccctcatcgacaagccgccgttcgaccctgctcatggcaagtttgatgatatcggccgccgagccttgcatgggatggttcatggcggtgcgttcgccaaacccgcgttgaacctggtttcccgatgtcaactcgggtatatggcgcttgcggccgaacatcgtaacagcatagcccgtcgacgatgcatcgcgaatcgtcgtgtcgagataggttctgacgcccgggtaggcagcgaagtaacgatcgatcatctccttcgcttcgccgtagggaatatcgaggctctgcgcgaggccgaacgcctgctgcccgtacacgatgccgaaattgacggccttcgccctgctgcgcagttcgggcgttatctcatcgaccggtatgtcgaacacgcgcgatgcggttcgagcatggaaatcctcacccgagcagaacgcctcgataagcccttcatcgcccgacaggtgggcaagcaggcgaagttcgatctgcgaatagtcggccgaaaggaacttgtgcgacggttcgaggggaatgaagcactcgcgaatatgcctgccgaattcggttcgtacgggaatgttctgcaggttcgggtcggatgacgaaaggcgccccgtcgtcgtcaccgtctgattgaacgaggtgtgcagccgcccgtcgccgccgcgcatgcggggcaacgcatcgatgtaggtcgatttgattttggcaagctcgcggtacctgatgatgaggtcgggcagctcgtggaccttggcgagctccttcaggacggccgcgttggtcgaatacccgcgctgcgtctttttcgtcggagtaaggcctatgacgtcgaacaggatatgccccagctgcttgggcgaatcgatgttgaactcctcgcccgccgatcggaatatttgggcagagagctcgtcgagatccttttgggtgccctcgccgagctgcttgagacgccccacatcgatcttcgctcccgtgcgctctacgattgcaagcactccgaccagagggaaatcgatgtttccgcaggcctgccatcccccgtcatcctcgagcgcccgcttgagcggatcgacgaggacgcgggctgcagccgcgttcatgacggcagcctgctcttcgctctccgcttcgggcagcacgcccccgcagtacccgtcaaggagcgcgttgtaagtgtactcgctcaccgacgagttcatgacgtaggcggcaagccctaaatcgaaagcatccatggcgagcagatcccgatcgccgacaagccccttcgacgaggtgtcggcgggatagacgtactggacggttttcttcacatcgagcgcggcgaacgacccttcgcgcacgatgcgggcgaacatggtaagcgcatcgtcgcgttcgaacagagccgttcctttcgacgtgctcaccgccaaggtcagccccgcgtcgaacagcgacgcctgatcgctctcttcgaaagcgacgccgaggcgctcccctgcttcgagagcttcctcgaaaagaccgagcgcctcggcaccgcgcgcaaccggctcccagttcagatcgatttcgctgcggccgccgcccgcaagggcgagaacttttttcagatgagcgttgaagcgcagagcgccgaacgcctccgacaccttcgcttcgtcgaacgaagggaaagacgccgcctcaaggtcgagcgggaaatcgagatcgcgcacgatggttgcaaccttgcggcttgcaaacgccgcatcctcgttatcgcgaaggttttcgagctgcttgccgcggaacttgtcaaggttggcatacacctcttcaagcgatccgtactgctgcaagatcttcgaagcggtcttctcgccgataccgggcacgccggggatgttgtcggacggatcgcctttgaggccgaggtaatccggcacctgcgacggctcgatgccgtagcgctccacgacttcggccggaccgtacaccgcaacgtcggatatgcccttcttggtggtcacgatgcgcgtgaggtcgctcgccagctgataggcatccttgtctccggtcacgagcagcgtctcgtacccgagcgcctcgtcgcgcgaggcgatggtgccgagtatgtcgtcgccctcccaacccttgacgcgcacgacggggatgtccatcgcttcaagcagcccttcgatcatggggaactgcactttgaggtcatcgtccatcggcggacgctgcgccttgtacgtctcgatggcttccatgcgaaacgcaggccggccctcgtcgaacgcgcacacgatcgcatcgggctgctcggtttcaacgaatttcagcagcatggaaacaaacccgaatacggcgttggtgggcctgccgtcgggggcgttcatagtcgggggcaccgcatggtaggctcggtgcatcagcgagtttccgtcgatgacggcgatctttttcggcatctgtgcatcctccgttatttcgtgttccgagaaagtatagaacagattcgaatcagggcggtgccgcgttgccgaaaaggaccgcgatcacacgacccaaggcggcgtttctgcatgcggcagcccgcagaaagccgcgatccgccgcaggggccacctcgcctattcggaaatgcgatagatcgcgatgtcgggacccgcgaggcattcgttcgcaggagcggcgaggtagccgattttagccatcaggttgacgagtccgaacggggtctgctctatttcggtcgccttccactcgccgacgagctcgcactcgcttcgcacggtgctgtagaagcgtatcgcatccatgtgatcggggttggacggatcgtagcgctcgtacatgtagctgctgatgacgatgtagtcgatgccttcgttttcagcggtctccagggaagccgcatcggcaaacgaatcggcagccgatccggcaagccgcagattgaacggggtgtagccgtcgaacgcactgttctgcggcgtgatgccgttctcttcacagtacgcgagcgcctcgactctcgtctggggaacaacggcgctctttgcaagcgcaaccgagcttgcaagggcgttcaacgagaacacggccgcaagaagggcgatcgcaatcccgccgaacgcgaacaagccgccgcgactccgccttgcgccatcgggcgcggcaggcgtcctcccgagaagcgtcgccgaggcagccaccgccgcgtaaaggcccaaacccatcaggacaagcggccccgcatacatgggaagcccccatcgaagccagtgcagtccgaacacgcttaggcaaacccacagcaagaggcagagagaaaacggtatcagatagcgcgctttgcggcgtgcgagcaaggcgatgccggccgccaaaaaaacgatcgactcgaggctcgtgtagggcgtatcgttgtacgttgcatcggggatggagaaaagccctgtcgcatagaaccagaggtttccgaaaaatcccaggccgtcagcccccagatgaaccgtgcgcgcctcgtttcgcaaggatgcgagcacagaagggaggtcggtcaccagattcggcgatattgcgaacagacagacgaacgcaacagcggcaacaagcaggatccgaagcgcgatctccttcgcgctgcgcgtgcggaagccttcgacgacgatgattcccgcaacgtagaagcagcagatcgccgccgggtacttcgtcgtcatgccgatcgccgtggcgacgcccatggcaacgaccgttccgatgccgccgcgttcgagatggcgaacgcccaggtatatcagcacgagaatgacaagagagaggggcacgtcgggcgaagcgtaccccgagtgcgtgatgtaagcgggaaagaacgcgaccgagaatgccgcgaacacgccggtgccccgcttgatccgctcgagtaggcaatgcgcaaccggaatcatcgcgatgccgcagacggcagtcaccaggcgcgcgatcacgtaaaacgccggaatggcaccgacggctgcggcatcggcaccgtagcgcagcagcgaatacgcgttgaacagaaacgcgcatatcttgatctgaaagtgatcggggtggaaataaacgtatgacagatacgaaccgcgttcgatcatctcgaccgccggctcgatgacattcatctcgtcggcatggagctgatgcggatagcccacgaagcacatcgtcacccgcagcaaagcgccgatcgcaacgattgcgaacagggccgctctgcgcgtacgcggatcgcaaaacgggttgttccaccgcgagatcgcctcgccgagattgcgcaacgcacccatgctattccacaacgtcctcgacgatatagcgaggccgatgcttcacctcgaggtatatctttcccacgtactgaccgacgatgccgagggaaagcagcatgagaccgccgagaaaccacaccgaaacgatgaggctcgaccatccggcaaccgtattgccaagcgcgtactggacgatgaagtacacgaacaggacaagggaaagcacagagacgcccccccccgcaatcgttacgaatttgagcggcttcgtgctgaacgacgaaatcccctcgaatgcgaacgacagcatcttgccgagcggatacttgctctcgcctgcgtagcgctccgcgcgcttgtagtacacgacgctgctcggatacccgacgagcctcaccaatccgcgcagaaacaggttgacctcgtcgaactccgatagggcgcacagcgcgcgacggctcatgagacgatagtcggcatggttgtacaagacgtcggatccgagcttctccataaccttgtagtacccctgcgaaaacgtgcgtttgaaaaacgaatccgttgcgcgagactcgcgcaccgcgtaaacgatatcgcttcccccttgaaaggcggcgagcatatcggggatgatgccgatgtcgtcctgcagatcggcatcgagcgaaaccaccgcatcgtatcggctttttgcatgcatcaaacccgccaagagcgcgttttgatggcctcggtttcggctgagcttgagtcctgcgtaaaggggatcggattcatggagatcgcacacgatctgccacgttgcatcgatcgagccgtcgtcgacgaacagaatgcggcattctcggatcacgccggagtcgagcaggccgcgcaccagcgccttcaagcgagccgcggtttcaccgagcacctcttcctcgttgtagcaaggcacgacgatgccgaggctcggcttttgtcgagcgaacgcacgcccgtcggcatctggcaggttgttctcaggctccattgatcctcaaggtcgcacgcgacgttgtcgcagggggcagtaagattggaattataccatagcccatcgtttgcgaaggtcctacatagaccaaaggtagcccaccccgcgcaccgtttcgagccgttgggccaactcggggccgagcttcgctcgcacgcgtctcacgtgcacgtcgacggtgcgcgacccaccgtagtagtcgaagccccagacgcggcgaagaagcgcatcccgcgaatacgtgcggccgggatgggtcacgagaaatgcgagcaacgcgtattcgagataggtgaggtcaagcggttcgccgtttaccttcacctgataggtcgccagattgatggtcatcgcatcgatcgcgatgtagtcggatgtcgaactctcgtttccgggccacaggagctgccggatgcgagcagagcactcgtcggccgtggcgccgtgcacgacgaaatcgctcttcacctgcacaggcagtctgaattccgaaagctggtcgtcgttgacgatcacaagcagcgagccgcagccgtcttcgagcagcgtcgattcgacgcgcgacacgttttgcagaccgtccccccgcgcctcgtagacgacgagatcgcacccggggtgctgctcgagcaggcgtttgaactgcaccgaagatcccgccgaaacgtcaacgtcgagcgccgagagcaccgcttggaacttatgggcgttatcaaggctgtccgctatgaatataacctgtttcctctgcatgcgcgcctcctagagagcagccagatagcgatcgcgctcccactgggtcacgttgcgctggtagctgttccactcttcgcgcttcgcttcgaccaggtagccatggatgtgctcgccgagaacctcgcgcatgaaaccggaggacgcgaacagttcgactgcttcgccaaggctgtcgggcaacgtcgcaaagccctgcttgcgcagctcttggcgcgacaatctgaaaagatcgcgatcctcggcaggcgcctgcagttcgagctcgtcttcgatgcccttgaggcccgccgcaagcatcgtcgcaaatgcaaggtagggattcgcggcgggatcggggctgcgcagctcgatgcggcacgcgctctccttgccgggtttgtagccgggtatgcgcaccagcgtcgatcggttgcgctgcgcccacgagatgtatatgggggcctcgccgccgtcgaccaggcgcttgtaggaattaacgtactggttcgtgatcgcgcagaattcgggggcgtacttcaaaaggcctgcgatgtagtgcttcgccaccttcgaaaggttgtagccctgagggtcttccggatcgaagaacgcgttgttaccgtccatatcgaacaggctctgatgcacatgcatgccgcttcccgcctcgtctgccatgggtttgggcatgaacgatgcgtggacgccatgcttcatggcgatttccttcactacgagcttgtaggtcatcaccgcatcggccatggacagcgcatcggaatagcgcaggtcgatctcatgctgagaggggccgttctcatgatgcgagtattcgacgggtatccccatcttctctagcgtcagcactgtatcgcggcgcaaatcgctcgccgaatcaaggcaggtgagatcgaagtagccgccgcggtcgagcacttcggttccctcggcgtccttgaagtaatagtactcgagttcgggccccacgttgaagacgtatcccatctgggccgcccgatcgacaatgcgtttgagcacggtgcggggatcgccctcgaacggctctcccgaaggcgtcttgatcgtgcagaacatgcgcgcgaccgcgttcgaatcgggacgccatggcagcacctgaaacgtcgatgcatcggggtacgcgagcatatcggactcctgcgtgcgacagaagccctcgacgcagctgccgtcgaagcccatcccctctgcgaacgcgttttcaagctcgctcggtatgacggcgaacgatttcatggtgccgagcacgtcggtgaaccaaaaacgcacgaaatggacgtcgcggcccttgattgtcttaagcacaaaatcctgatcgggattcgtcgtcatcgatgccttctttcggtcgcggtacggcgcgccgcctcttgttcggcggaatactctgtgatgttttcattatactgcgctttatttcaagttgattacgcgcctcgattacgtcgtccaaggaaccacgaagtcaaatccgcaacgccttggtttgccagaaaagaaacagtttccatggcacaaaaatgtaatgtactacagatttgtcgtcgtgtcgaaatgagaccggcaggatcttgatgctctcgcaccgccgatgcatacagcctgcccgagctacgcctggcagcagccgccgatatggaaaggccagcccgtaagctgacctttcccgatgaatcttcgtgcagcctgctcggaggctgcggtttgcggtatgcaggatcgcctgcgccgcacttagaacgtcgtgacgactgccccgtcgtacgtggaatcgatgtattgcttgacggtatcgctctggagcgccttgacgagcgcctggatcttctcggaatccttgtcggcgggacgcacggcgataacgttcacgtatttctcggccgcttcggaatcggcttcctcgctcgcgatggcggtcgacggatcgagtcccgcaccgatggcgtagttgccgtttatcacagccagatcaacatcggtaagcgttctcggaagcacggcagcctcagcctcgacgatttcgatgttcttggggttctcgacgatgtcgtttttcgtcgccgtcaaaccagcgccatccttgagcttgatcaatccctgatcctgcagcagaagcagggcgcgggcctcgttggtcgcgtcgttcggaacggcgatctgcgcgccgtcggcaagatcctcgaagcttgccgatttaccgggatagacgcatagcggctcgaaatggatgccgcccgccgaaacgaggtccaagccgcgctcggcatcgaaatcctcaagataggtgatgtgctggaagtagttcgcatcgagctcgccgttggaaagcgcgagattcggttggacgtaatcggagaactcctggatctcaagcgtgtagccctcttcggcaagctggtctttaacctgctcgagtatctccgcgtgcggcgcaggagaagcaccgaccttgatgaccttgtcatcggacgaaccgcccgcggcggcatcgccggcaccgtccgatccgcaacccgcaagcaagccgagggcgccgcacgcaagcgctgcggcaagactgatttttactacgtttctcaatttcatggtattgcccttcccttttctttcaatacgcgaatgcacgtatgagtttagaattctagtgtatgcacgaggaaaaacctgttcgaagtgatgacgtttacggtaagcgcgctatctcgaccgcttgtcgacacggcgggcgaccacgttcatgatgctctgcatgatctgcacgagcacgatgcagatgagaagcgccgcgaccatgacttcgacttcgtagcgcatatatccgtacctgaccgccacgtcgcccaagccgcccgctccaaccatgccggcgatagccgagtagccgagcagcgtgatgagcgtaatggccgcaccgcgaacgagagaaggaacgctttccttaaggtacaccttcacgacaacctgccagatgttcgcgccgaaactctgcgccgcctcgacgagtcccgcatcgacttccgcgaggctctgctcgaccatgcgcgcaacaaacggaaccgcggcaatgatgagcgggaatatggcaccgggaacgccgagcgtcgtacccatgacaagccgcgtcgcgggaatcagcacaacgatgaggatcacaaacggaatggagcgtccgatgttgattatccaaccaagcaccgcattgagcacccgattgggcctcaggcccccaggcgccgatatgaacaaaagcacgccaagcgggatacccacgagataggccacaacagtcggaataagcgtcatgagaaccgtattccaggtttccgcggcgagcagcgcgctgtactccgcaaaaaacacctgcagttcgcccatgctacctcacccgcccttcgacagattctcccccgcgcgtcgcctgacagacttcatcgggacagcccgcattgacgaggggagcggacgcggcatcgagggcatcggcaaggatggccgaggcgggttcgcgacgcacctgccggggagcgcgcgacgccgttgccccgcaatcgcccgacaaggaatcggtgcccaaaagctcacgggtaacctcgctttgcggattcgagaacaccgcagcggtttctcccgtctccacgatacggcccttatcgatgaccgcgatcttgttgcagatcttttcagccaccgcaagcgagtgcgtgatgacgatcatcgtaacgccgagctctcggttgatgtcgcgcaaaagcccgaggatcgaaacggtcgtacgcgtgtcgagcgcactcgtcgcctcgtcgcagagcatgacgcgcggattgttcgcaagtgcgcgggcgatggcgacacgctgctgctggccgcccgaaagctggcttggatagcttttcgccttttcggaaagccccacaagttcaagcagctcgagtgcgcgctgctcccgatgctccttcttatcgcgacgcagctcaagcgggaacgttacgttcttcagcaccgtccgctgctgaaacagactgaagtcctgaaagatcatgccgatcgagctgcgcagcttgagaagctgcttgcccgaataacccgtcacatcctcgccatcgatgacgatgcggccggatgtcgggcgctcaagaaggtttatgcagcgaacgagcgtcgatttgcccgcgccagactctccgatgatgccgaaaatatcgccatcttcgatcgtgaggctcacgtcggtcagcgcatggtgctcggatacgccgtcgtatgttttagacagatgctctatctggatcattgttcagatttcctcgtacagaataactaacatgatatgcggccgtacatggttgagatatggccgcgcgaaagctaggcctgagtgtccgcgcgcacgccgacgaacccaggcttaggcatgcacatcatcatgctatgtacgaattcgaaactcataacgggttaatattagtcgaagctctcgggatgtcaagcgttaaaccgcaattcggagcgatccgacctgatccgggaccgatgccgaaaaccatcaggacggcgagcggcgaacaatgggcggcaaggaaaggccttggccagcccgacgcgcctgaattcgagaggcttgccgcccagcctctcgaatcagctcaggatcgcttcgcctcttccacgatcgcgagcaactggttttgcgaatggatgccgagcttcttgtaaatgctgtagatatggcttttggccgtagccgtcgatatgtacagcctatcggctatggccatagccgtatcgccttcggccaaacactcgaatacgtcgcgctcgcgcggggatatcccgaatcgatcttcgatggcattgagcgattcggcatccgatcgttcgtcgaacgtcccatccgggcgatacacggtcaaatcgctggtgatcagcgtcatgaactgaaaattcgaacacgcaaggtaatacgagttgagcttggagaaaaaatctttgatgaacaggctgtcgagcacctcggggcgagcggcaaaccctatctccagataatacggatctttcatggggacggtggccaaatcgttgtcgcgcattaggttgagaggatcgagcagcttgtaaaacgcaggcaccaccgtaatggcctcgtcggcggccaccactttgaatcggaaggagttgtcgctcgtcaccatcgaaatcgcgtcgcttccgaattttgattccacaacgcggcgaatgtcgcccttcggtacgatcaatcgcttggataggatatcggctctcgacaacgacgggcgcttggcgagatcggaccctttcgataccagcacctcatcgtaggaatgcaggtacggctggtatttgaacccctgctgttgcagtgcgtggacgaagcgcgcattccgatcctcgtcggtgctgaacagacacagcagcccgatgacagggtcgccctcgtccgaagacaggagcttttccaccacttcgtcgttatcacattgatagtaccgagcacgtgccgacacctcgtcgaaactgtctacgagcggaccgaaaaacgcggaatcgaaacacacgttgttcagataggccaccaccccatcgtcttcgccgcgttgctcgtctgcattgagctcggcaacgcatgcgagcatatccgcttgcgcgcgcagcatttcgctggcatacggaagcagtgcctcgccgtagcggttcagcaccatcttgttcgacgtacgccggaacaacttgcaacccagctccgtttccaacaccccaagcgatcggctcatcccctgcgaagatatgaagttgatattggccgccgccgaaatggacccgtgacgagcaacgtcgacaaagtacttcagatagttcgtctgcatgacaaccccctgagaaccactgtccatacgcgaagaaattgcaccgaaaagcctttcacccaaggcgggcaaacaactcgcgcgcagataccccaacgcccgattgcgattataaccgcaatcgggcatgaagcaacaccgcaaacggatatcccgcttgcgcaggttatccacggaaaaccgaaacgcctacggaaggccgagcaagccggcggtcatcggagtgatggtcaccgtgatgatgaccatcacgagactgggagcccagccgactttcaccatatcgccgaaactgaagtacttgcggtcgctcgaataggacagaagaggcacgccgtcaagcgggagcataagcgcgatggccgaccagaaaccgaccatggcgcacgtcgcggcaatggagccgcccatgcttgccacgatggtcgcaaacggtacggcgatgaggccggcgcatgcgggacctgcgggaatgacgttgtgcagaatgcagccaagcacggacaaggcggtgagcgtaacgatgagcggccacgcggtcatcggagccatcacgacgcttacgagccacgcagtggcgcccgtgcccatcaacgcagccaccaaaacgttgacggccatcatgagaagcatcatgccccaaggcgaatcctccaagaagtggttgaacttgatggcttcgacacccgggaagaacatgaggccgagcgcgagcaggctgactaccgtgatgtcgatagcggtaacccacgaactcgcgatccatatgaccatggtagccagcatgacaaccaaaccggcaatctcgtggcgaggcagcttgcccagcgaagaagcgcgggcgatgccggcatccaccgcttcctggctcaaggattcgggcttgaatatcttgatgagcgcaaaccagccggccgggatggtgatgacagcgagcggcacgccgaaagccatccattggacaaagctgatgtgcacgccgaaattctgctcgatcagagacatcgccagcacgttgatgatgcagccggaaggagtcatggcgccgcccaaggcggcagcccacggaatgccgattgctatgcatttggcaaatgcggatttaccgcccgtcggggtgttgttggcatcgagcaccgcatacgcgatcggcagcatgaccgccgtcagcggcaagttatccataagcgttgatatgagcgccgtgccaaccatgaaccccagcagaacgcgcgaagaattcgtgccggcccatttgaggataaagcccgtcaaacgcacggcgaacgaagaccgcgccacgaaacacgcgaatgcaaagcagcacaaatagaagatgatcgcgttgttgatcgaggccgtccaagcatcagccgccggcaaaatacccaacaagggaacgagaccgaccatagcccaacccgtcacggcaatgggcatgacctcggtaacccagaacacgatcgccacaacgaaaatgcccagcgacatcttcccggcccagctcaacccatccggcgtcggggtcacgccaagcgccacgagcgcgatgatccccaacgcgataattccaaggcggacagccgccgacttctccttcatttcttcccctttgatcgtttgccaatgaaagtttcagacaaccgctagcgcagcatgtccacgaacacgtcgtccagcacaacatctcgggcagcgcaatcggcatcgagttcgatcgcgtcgtagccaggagcctcgatacgcacgcgatacgacgtcttttcgcattcgcaataacggaaatcgccgaattcgtcggtctccacccgcgcgacggccctgccatccgcatcgaaaatggttaccggtgcgccgacgatcacctcgttctcgccgcgattcgccaccgtgccggcgatccaacgtttcggacggttgaggtagtacacatgcgagcccaaatctttcaggcgctcatccgcttcgccttcggcaatctcgtcggcgaaatcctccatatcgccccaacgcagcgcatcggtcgcgcaagcatcgacgcagcgcggctgcgaccagccactatcaagcaaatgggcgcagcctgtgcacttttgggcaacctgggcttcgctgttgaagtacaccatgcctaacgggcacgcccgggcgagttcacgacgtccgcgcgccttctcggggtcgatgaccaccaaaccgtcttcgcggcgatagaccgcatcgggtgccaactcgatcagggggcatgcatcgcagtgcccgcagaacacgggcgtatacgcaacgcgcacaaccggcactcggccgcgttcctcctcatccacacggcaccaaaactgcccggtctgcggctgcgcgatggcaatgggagcccaatcgttgtcgcagtgctcgtccttgcaagcaagctgacagttgtagcagccgttgcacctgttcagatctactatcagtgctttcatgccctttatgcctcctcgatgtaatcacgtacgtcctggccgtaggaagcgtcgtagtaccgattcctgttgaactcttcgggatacttcgcggcgagttcgaacacatcgaccttctccacgcccaccaaatagccgctcgtcacttcgccgtcggcgtttttcgatgtcgttgccgtcgggcaaatgaggttgatggcaccgccgcggtcgagcccgcccatgcccgacacgataacgtcggagttcgcgccatgatccatgtacacgacctcgggacggattcgctcggtcacgcgaacgccgccgagcacgctgccgcgttcgttgtagaccttcaccacatcgccgtcgaccacgcccacgctcgccgcatccgtcgggtgcatccacagcggctcgtaggcgtatccgtcgggaccgatgaccttgcacgtttggatttcgcgcaaccactcgacatcgtcgaattcggcgtgaacgcgccaacgcgggtggttcgatacgatgaggaacggatacttcttcgcgcgatcggaactgcggcgatcatcatggccatcgccggattcgcgccaatgcgcaaccgggccgcggagctcgtcatcgggaaacatcgttgccagtggctgcgagtagaattcgatcaagcccgtcggcgtctcgagaggattagccgccggatcctccgcaaacggcgtcaggccaaccggctggtcttcccatccctcttcggtgggaatcaattggtaaccccgctttttaaacgcctcgaaatcccggtcctcttcgggaatgccgcacgcctcgtaaccttccctcacctgctgttcgatggttttgcccttcgtcatgcgctgcacgatgccttcgtacacgccgccgaatttctcgagcgcccggccgatctcctgcacggcgatccaatccgacttcgcctcccccaccgcatcgatagcggcctcttcgaacgtgacggcgctccattggccggaatcgttgtccgtaccgaaatcgctgacctcgaacttcgtgcagatgggcagcacgatatcggcaaaacgggcgtcgtcctcaaaccacggtgcctgcaccaggtagaactcaaggttttcgcttttcagagcatcctggaattcatagccgccgttgaggctggtcgtgaacgccggattgtccgaccacagcatcttcacacccgcatcgccgtcaagcggaaaccggaagtgcttgaactgatccgcacgcggatcggcggccgtcccatggccgtaccactccaattcctcgccgcgcagagccttgtgaatatgcactttcggaacgaagctgtcaccgccctgaccgatgagggggccgttgtagcaggcggccgtattgggaataaccttcgaaagcggcagcggactgcacgaagacatgccgaacaacacccattctatgtacttgatggaaatgcggcccggcttgcctacgccctgcatggccagcagatacacctccaaacgggcgggttcgtgggcgaatgccgaccggatgaacgatcctccgttgcagtgcgcgatcgataccgcatggcttgcccagtaacgagcaagcgccttgatgcggtacgcgggaataccgcagatgggctcggcccattcgggcgttttcggcacgccgtcctcgttgccgagcacgtagtactcgaaccaatcgaagccgtcggaatgcgtttcgatgtactcccgatcgtacgtgtcctcggtcatccacacatacgcgatcgccaactgcagcgcggcatcggtattcggaaatacggggaaccatttatcggcatgaacgacagccgtgtaattgcagtcgggagcgatggcgaagttcttgatgccgcaatcctcgaaccagaacgccatccgggaagccatctggccgccccagccccacgtggtggtctcaagatcgcaaccccagtacagaagcgcatcgcaattctgagcgatatcctgagccgtattcgtggaatgggtgttctgtccgacgggatccatgccccacgcatgcttcgcgccccaataccaaccctcccagctatcgggattgcggttctggatggtgaacccgccgcattcgcccaaaagacgcgtcatgcagccatgcggggtgttgatcgccttgctctcgccatggccgtccgcttggcagagaatggaattcggaccgtattcgtcgtgcacgcgcttgatctcgctcgcgatgatctcgcacgcctcgttccagctgattcgctcgtatttgctcgtaccgcgcatttcgggatgccgatcgccgttcggatcccagtcaatgcgcttcatcggatacggaatgcgattcttggaatacgtgcgacgtttgtagactagcggaaacggcggcgtatacgatttcattcccggctcgaacgtcttaccgtcgcgcccggtgatggtccagtagttcaactcctctttcgtgtagtcgttttcgaagtgaacgggacgaatgcgcgccagtttgccatccagaacatcggcggcgacaatgttcgcacctcccccgaacgactccaacccgaggttgtgcacgacggttttctcggtgattttcaacgtctgctccctttctctcttttctcgcttgatagcggcatgcggctactgctcgaggcgcgcacgctcttcggcgcgcacctcggaaatctttttgtcggacttcacgaatacgatgaccgccacggcagcgagcacggcaagcggcgccaaaacgaactgcgcattcgcctgccagccaacgctcgcgacgataggcgagacgatgtagcctcccacaacctgcgcgacacccgtggcaaacgccatcgtggccagcacgaggtcggttttcttcggctcgggaacgagcaccggagcgatggcgcgggtgccggtaggcacaagcgcaccgcacaggcccatgagaatgctcgcggtccagggacccgtcatatcggtgccgggggtgaagtagaagaacgccatgcacaaagccactagaagatagccgcccgcaatcatccacttgcggaagttgagcttgtcggcaaccacgccgaatgcgatgccgagcggtatggaaatgagagccgtccaattgggaagcatggccgaatcgaatacgtttaagcccttgacgttttgaaggaacgtcggatacagggtgttgatgttcgcaacgtaatcgaacacccacacgaaaaagaacgcgcacacaacgaaaccggccagcatgtagttgcgacccggcttctttcgacgcgaggggtcaccgtcgaccaactcgttttcgggaatggcgggcatcttgcagctgaccagcagccacacgatggatacgatttccatggcaatggaaacgtaccagatgggcctccacgagaacgcaagcgcggcgccgccggcggcatcgaatatcatcggagcggtgaagaacgctatgaccacgccgacaggcgtccactgagaccaaatgcccatgcacaaaccctggtctttcagggggaacaggcggggcatgatgttggggccgatgacgcaaatcaaaccgtacgccacgccctcaagcgtgcgccccgccaaaaacagcgccgtgtcgggagcaaacacgcaaatgagagagccgaccagctgcaacgccgacgtgacgacaatggagaattttatgcccaggcgctgcatgacgaacattcccggaaaggccagcagcatgccggcaatggaaaacacccccatgatctggctgagcatttcaacggacattcctaaatcggcaccgatgaactggatagcaggcgcggctttgaactggttgaacgtcgcggtaaaaccgaggaagaacagcgcggcgaagcacagccagcgctccgtcgaattgagctggcggctttgcacgccgtaacgagaaacggatgttgccatagatccccctatcctgatgaatgtccgaccgaacccctcggtcacgcctcatcgcgcgacggcgcaactcggccgctttcaaacaccattctgacaggcggctaatcccgaggacataaacaagcaggcatgcagactcgcaacgatttgttgacccctcatacttgcatgcgcctcgacacccgaccccggcccccgtcgcaatcggaaacgcgttttcggatcggaagcgaagacgcgataatcgcaacatgggccgattcgaccggcatgttccctatccttcgcattgccgtgcatctgtgtataatggttcgaatgaacagcacaaggaaaaaaatagcagtcgtaaccatgggagtgaaactcggtgacgagacgcggggctacacccgtttccgctttctctccgagctcctcgttcgagaaggattctccgtcgatctcataacctcgagcttccagcattgggacaaagccccccgtgacacgtctcgggaatgctatcggaaccttccctactcgatcgtgttcatagacgaaccgggatataagaaaaacctcgacctcgcacgtatcagaagccatgccgtcgccgcaaagaaccttcgcacccacttcgctcagcacggcgaagactacgcgctcgtctacgccgaaatcccgccgaacgacgtcgcccgcgtgtgcgcagaatacgcaagcgagcacgacattcccttcgttgcggacatcaacgatctgtggcccgaggccatgcgcatggtcgtcgacgtgcccatcgtcagcgacatcgccttccatcccttcgcacgtgacgcgaagcgcgtgtacaccctgctttcgggagctgtcggcacctcggacgaatacgcgatgcgccccgcccaagaccgaaaagagccctatccgaaggccaccgtgtacgtaggcaacgtgctgtccgaattcgacgggggcatcgccgcgtaccgaagcgggataagcaagcccgatggagaggtatgggtaacctacgcgggcactctgggagcaagctacgacctcgcaacgcttatcgaagcggcggcggcatgcgcggcgaaagccgcacccgtccgcgtgaagatcctcggagacggaccggatcgggaaaagctcgaagaaatcgccgcacggcttgcagcacccgtcgatttcctcggctacatggattatccccatatggcagcctaccttgcagcctccgacatcacagtcaactcgctggtgaaatcggccgtccagagcatcgtcaccaaaatcggcgactaccttgcaagcggacaccccctgatcaacaccggcacgagccccgaattcagaaacctcgtcagcgagggaggcttcggcgtgaacgtcgaggccgaaaacgcagccgcccttgccgaggcgatcgaaaagctggcgggtaacccgagtttgcgaaaaatcatgggcgcgcgggcgcgcgccgtcgccgaaagcgaattcgaccagccccgctcctacatgcgcatcgtcgacctcatccgcaagctgatttgatttctttgcaggatgcaaaccgatacggcccctttgccctataatgagtgtccatggacgacaagcgacacatagccttctcaccacccgatatcagccaggctgaaatcgacgcagtcgccgaggcgatgcgttcgggctggatcaccaccggaccgaaaacgaaggaactcgaacatcggcttgccgatctcacgaaggccgccggagtcgcgtgcctctcatcggcgaccgcagcgctcgaatgcgctttacgggcgctcggcataggcccgggagacgaagtcatcgtgccggcctacacctacaccgcctcttgctcgcccatctgccacgtaggcgcaacgcccgttctcatcgacacggcaccaggctcgttcgagatgaactatgccgaactcggcgacctcgtcaccgagcggacccgtgcggtcattcccgtcgacattgcaggcagaatgtgcgattacgacagactcgagggcgtgctcctctcgaaaaaagctctctggcgcccgcaaaacgacctgcagcggctttttgaccgggtcgtcatcgtggccgacggagcccattcgctgggagccgattaccacggacgtccgagcggatcggtcgccgatttcaccgcgttctcgttccatgcggtcaaaaacctcacaaccgccgaaggcggagctctcgcctggcgcaacggaggctttgacaacgaggagttctatcggggcatcatgctgcaatcgctccatgggcagacgaaggacgccctcgccaaaacgcaagcctcctcctgggaatacgatatagccttcccgggttggaagtgcaacatgaccgacatccaagccgcgatcggcctcgcgcagctcgatcggtatcccaatctgctcgcccgtcggcgcgagatcatcgcccgttacgaagcggggcttgccgacgccgacgtaaccctcgtcaagcatttcggtgattgggcgaattcgagcgggcacctcatgctcgtgcggatgcccggcaaagacgaggcgttccgcaacagggtcatcgaactcatggccgaagacggcgtcgcaacgaacgttcactacaaacccctgccgatgttcaccgcctaccgcaacctcgggttcgatatcgccgactaccccaatgcctacaaccagtaccgatgcgagatcacgctgccccttcacacgctcttaagcgatgacgacgtcgattacacgatcggttcgttcaagcgtgccttcgcgcgtgcgagcgatcagacgaagcgggagtccgattgatgtacgcccgcttcgggaagaggctgctcgacattctgcttggaatcgtcgctttgcccttcgtcgccatcatactgcttatcatggcccccttcatccatttcgaggacaagggaccggtgttttacaacgcgccgcgcatcggcaagggcggccgcgagttcaagatgtacaagctccgctccatgaaggtggatgcacccgatctcacgatgcccgacggctcgacctacaacggggcggatgatccgcgcatgacgcgtatgggtacgttcatgcgtaaaacgagcattgacgagctgccccagatcctcaacgttatcaaaggcgatatgagcctgatcggcccgcgccccgacctcgaacgagaaaccgaactctacgagggatacgaacacgaaaagctccttgtgcgacctggcatcaccggatacgccgctgtcagcggccgcaactcccttccttggcacgatcggcttgccctcgacgtttactacgtgcgcaacatctcgttcgccctcgacgtgaagatattcttcaagaccttcgcggtcgtcttcgcccgcgaaggcgtcttcgtcgaggaaaacgaggaccggcaacggtaacgcgctttagcggtatctcattcgactccgaaaggatcccatttatcggctatcccgtcgaatgcgccgcgattttcaagttctcggtaaaaatccttcgtataccgatacattgtcatgggatactctccgaattcctggccgagagcctgtttgtactccgcccacatgcaccagagaaaacccccgagggcaatgtagaggtaaaggcgcagccactcgctttctgaaggctcttccccaacgtacaggcgcagggcgaggtcgatccgctctttatcgaactcggcgaaaatagcatacatggcaacgtccattatcggatcgcccatgccggcatactcccaatcgatgatcctcccctcgccgctgggaagcatgaggatgttgatgtgggcgtaatcgccgtggcagaggatctcgggaacgccaagacgctttttcaattcgaacaagcgacgaaccttgcggttggtctcgttgatatcgcggaacaggatcgcatgggcgctttcggcaagctcgtaataatcggccgtcatgcgcccgatatcgaagcggtgcggtatctcgatggcaaggtcgtgcatctttctgatttgccgcatcgagatttcgagatcgcgatcgtcgaaggggtccgccgagcgaacatctcgccagtagcgcgtgatcttaatgcccgtatcggcatcgaagcgaacgacttcatcggatatgccgagcggcattatcgaatcgtacacgagcttctcgctgcgccgatcgatctgcttgtcggttcctatgccgggaacccgcagcacgtactcttcggcgccgagggaaaaatgaaacgagttgttggtgactccttctttaagaggaaagatatccttgatcgacgcctcctcgacgccaaacgactcggcgataaaacgcatgatctcgttgcgggaatcgattgcgtaagaaatatcgtaagcgcgcagctcttcgaggcactcgaactcatgcacgttgcccgtttgatcgctcgcatacatagccaattcgtctatatggtctttgagaatctgctcccagtaaaaatcatcggcatccgcccgatcctcgtactcccccatgagctcaacgaatcgggctgagaaccgcgcgttgaaaaacgccggccctacgatggcaagcgaatccgcacccccgatttcgatacccgttatccgcatcgcctcgtctgtatcgacgcaccactcgtccgtcggtccgtcgaatcgcaagcacgaaaaccaactgtcgaattcatacgcattgaatatcgcccgatcgatccagttgtccgcaacaagcacatacgagttccccagatacgatgccgcacaccgcaggctctcaagattgttctttacggcgtaatcgggattaacgacaagcttcacgccgtatttgtccacaagatactcgaacgcctctttcatgtagccgactacgattacgatatcggaaacgcccgcatcgatcagctgctctatctgatgctcgagcatgggctttccatgaacctcaagcaatcctttgggtttttcataggtgaggggaacgaatctggaaccaaaacccgccgcaaggataattgcgttatcgaccctatggggttccaaagattctagcccgtgcgaagttgccctaaagccctcgtcgagcaatccgctttcccttaaccggtcgcacgtcgcttcgaccgactcgggcgaaagcccgctttcaacagccagccgttgatacgtgcgcggattttcgctcgcgtccacgcatgcgcgaagcacataaaacgcttctctgctgagacccattttctcccctttactcgccctctatcgcacataatgatagcgcaaacgcatacgatgggcttcgaacatgatacgaacggttgtacattcccgaagctcatcgcaagcggagcgcatccgcccgacgcgaaaacgcgcttcaacgcattcgcggccgtattcgcccgcgaatgcgtcttcgtcgaggaaaacgagggctggcgaagccgctaacgggccgaatccccatagagctcgatcgcaagatttccgtatatcttcgcagctcgataccaaaggtacagccattcccccacaggatcgcccgccgaatccttgaacaacgcccaaacgaaccagtagtatgcgctgattcccacatacgcgaggcagtgcttcatctcggagtcggtcggcgttctgccgaaatagagagcgattacgcctttcgcctcttcgaccgtgtaatccgaacagcagatgaaggtcccgagatcgctcgcgtagtcagacatcgccgagtattcccaatcgatgagatacataaggtcgtcgcgtacaagaaaattcggattgtagaaatcgttatggcacaaacacggctcgatgccgtccgatttcaccagtcgatcgagctttcccgcacgcgccgtcagctcatcgaaatcggggaaagacgggtccgaccgctgcccgagcaaacccacaagctcgcaagccttctcgtaaacgtcaaacgaccagctggagacctccccgctggtatgaagcttgcgggcaagggcaagaccccgctcaacgtgttcggggttatggtaatcgaaatcgacgcaatcgaatacgtagcgcgacagcttccaacccttctcgggatcttcgtaaatgaacgtgtcgtcgataccgagcctcttcgcaacgccctgagagtgcgcctcgcttttcctgttgatgatctcatcggtgcctgctccaggatggcggtacacgtaggtcgagccatcgcaggcgaacctgaaggaaagattggtaagcccctcttttatcggcacgatgtcgacgatggccgaccgggggcacccgagaacggagcaaatgttatcgagtatttcagagtcgacgttgtcgatgaaatcgccgtcgaacgctcgcaggtcgtcaagggaatcgaactcgtagatgatgccggggtcataggggcgcatgaccatatcgaaatccttgatatgatcgatatacacgtcttcccagagcttgcctgccgtttcgggcttatcgtagtcttcttccagcacctcgatgaaacggcttgaaaacgcatgatcgaaatacacgtgcccaagcatgccgtaggcatccgatcccccaaccgtagcgcccacgatacggttgcctgcacccaccgtcaggcagtactcatccgttttcccctcgaagaactgcgccgaataaaatgctttgtattcgtagggcgcgaaaacgttttcagtgaagtaatcgtccgacgagcaaatgtaggtattgccgagcagctccttcacaagcatgagcgtcgaattattattgcgcacggcgtattcggcattcactttgatgcgcacgccaaacttgtcttcaaggtggaagaacgcttccttcatatagccgacaactaccgtgatgtcatcgatgccggcctctttgagctgacggatctggcgctcgatgagaacctcgccgcgcaccctgagaacccctttgggcttatcgtaggatatgggagcgaaccgagaagagaaacccgccgccatgatgatggcgttttccacccgataaggttcaaggctctcgaaaccccgctcggtcacctggttgcccgcctcgagcaagccgcctgccagaagctgcttgcacgtagcgttcaccgacccgagcgaaagaccggttgcttcagctaaatcccgctgcgttgaaacacccccccccgaagcgcacgctcttagaatgaggaattccttcttatcgagagacatggacatccttccaatccgtatccgtaaatccgttcaaagcgcagttcgccgctctgatccgccagccaagacgcagggttcgccatggcaaaacgcccgaccgaaacggccgggcgcgacgatgtgcaatcagaatccttatgcggtctcgagcgccggatccaccgtctttcgagcggcttccttgtcctcgaggagcttgtccttcgcctcaagctcttcggccttcttaaccgacagccaccgggcaaaggcgatagcgcatataccggcaaccagcttgccgaacatgatcggaacgatgagcgtaggctggaagttcgccgtgaacgaaaggtgatcgccaagcacgaaggcgcagcagaccgcaaacgaaagggtgataaccttgtcgcgcgccttcatcgtcttgaacatcgcaagcagcgcgagcaggtttgccgaagccgcgaggatgcccgtcattgcatcggagtcaagccctacggtattgccgagcttttcaagcggcttggcaaggaacttcctgatcagccataccatcgggaatgcgccgcacagcatcatgcccgtagcgccgcatgcttcgagacagcgcatgaggtcgtcttcggtcgcaaggatcggatcgaatccccacgccgacccaagggtcgaagagaagaatccggtgaagtactcgaccacgcacaggacgaggattatcttcagagcagattcgagcacgcggccgaacaccatgaagcccttgatcatcgcatcgggcttaaaccgcagacccagggcgagggccacgcagatgataatgagcggcacaagattgattcctatctggctgaacgtaagcgcaagctgataggtcgcctcggtattggttgcggcggtttcgcggatgaacgggttcgtgaacgcaaggataacgctcgtcacgagcacgccgatcggaatcgccaggaatccgctcattgcaccgagtgcaaggtacttctgatctttcttggggatcatcttaagcgccaccggtatggtgaatacgatggtagcgccagccatatagccggtcgtcatggccatgatccagccttcgtaggtttgagccagcgtttcggcaagttgatagccgcccatatcggaagcgatgaacgtcgttgccgcaagcgcagggtctgcacctatcgccgcatacgcaggtccgaacacggcgctgatgaacgccttcagatacggaatcgacgcccatacgccggcaaccgacagaaacaaagatccgatcgcttcgatgccgaactgccattgttggccgagctcgctttcgggtttgataaccgaagcggcacaaccgacaatcgcgcagatcattacaatgtacacgactaccgtgccgagcatctccatggaaaaccacacctttcccagcggcccctcgccgctcttcgaagcgcaccaagccgtcggcggcgatcccgccggacgatgcgctttccgtactattgcttgtacaaagcaagcgcctgcttcatcatccgcttgcagaattgataccagttgaattcgtcttcgccgatcggctggtcgagataagcttcgtagcctgcccaaaccgtccaatagaacttgctgagccccgtgcccgctatgctatggcggtactcttcgtcggtcgcctttccgccaaaataccgatcgatcgcataacgggtttcttcctccgtcatgaaatgctgcaaaaacgatcccatgtcgagcccgtaatcgcctgtagccgcgtactcccagtcgataaggtcgaaaccatcttcggatacgaggatgttgttgccccacgcatctccatggaccaagcagggcggcacgttgtcggcgtcggcatagcgcttcgtctcttcagccaactcgaacagatcgatgaaaccctcgggatagttgtccctgcttccatacatcaagtcggccagctttcgcgcctcttcgtacgcatcgaagcagcgcggcacggtctttcccgaatcatgaagcgcacgtaccatcttcatagccgcgtcgatatgctcgcgattgccgtaatcgaacgtttcggttgtttcaacgaagcggcttatcttccatccttggttggggtcttcgtaaatgaaggtgcgatcgagccccagttcgaacgcgatcttctcggcctcggtttcgctcggacggtctacgaggttttcgctgccgtttccgggatggcggtaaacgtaatcctgcccgcatgcggaaaatttgaacgagagattggtaagcccttctttgatcggcttgatgtgcccgatgtcggatcgcgtgcatccgagcgtcgcgcaaatgttgtcgagaatggaggagtcgacgttgacgatgaaatcggggtcgaacgagcgcagatcgtcaagtgagtcgaactcgagaatcgagccggactcgaacggcttcatgaccatgtacagatccttcgtatgctccgcgaagatctgatcccacagcttcggcttggtctggggcaaatcgtattcgtcttcgagtatctcgatgaacttctcgctgaatgcccggtcgaaatacacctgaccgagcgcgacgtagcgatcttcgcatgtggtctcgccgtatttgacgatgcggttcgccgtcccaacttccataacccattccgtcacctggccgggaacgagcacgccgggaatgttagcctcgtattcgtatcgggagaacacgttttcgggaaagtaattgtcagacgagcacacgtaggtgttgccgagcttctcgcgaacaagccagagcgacgaatggttgttgcgttccgtgtattcgctgttcacggcgatcgaaacgccgaacttctcctctagatagaagaactgctctttcttatacccgacgaccaccgtgatatcttcgatgcccgcttctttgagctggcggatctggcgttcgatgaggatatcgccctttaccttgagcaaccctttgggcttgtcgtaggaaatgggagcgaagcgcgaagcaaaccccgcagccataatgaccgcgttctcgaccctgtacggctcgagcgcctccatgcccgcaggcgtcacgcgataggactcgtcgagcagagcctcgccgataaggcgcttgcacacggcgttaaccgtcccgagcgacaatccggtaaggcgaaccacatcgcgctggcccgaaaccgcagcggcatcgcggcacgcatcgagaacgagaaactcatgtctggtaagcattccacccatcccattgctttagtgttcaaattcgtatctagcatcggatattttgaacttgtaaaaggaaggtaaaatgagcaaactcgatattcacagaaaaaacaacttgatatgttttccctcaacagcagttttttagccgccgtatttgtatctcacctgataaataccatagttgttcaatttgagccaataaacagactttacttaaaccgagattggcattttcataagtcatagtttttgttcaaattatataaacaatcttatcatttgaacgttagaagcagacaggcgttcataacagcatgccgttggaagaaaacccgaaacgctcgtctaggcggatcgaatcccaaccgccagcaacctgaacagttcgatcatgcgcaagcactcatctgcggaaggttcgatcaggtgcataatcggcggcaggagattccacgttgccgatccgaccatcaaagacacgcttacgcgccatgcacccgagcaactatcgtatgcggcacttgcctgcgtgacgcccagcagacgcaagcgttcctcgataagatcgttctcgaccagcgcggggaacagcgcaaggggatcgccccccgcgttcgcgctgtcgccaatgagcttcgccgaacccgagaccatctccatcatgcagccaggagcatatggcccggcaaccgaaaactcgcatacgagatcatacaagattgcgaatagcttgctctgggggcggtatcgcagggtaagggggcccgtttcggagcagcaccgcaggtccaaaacgcggacaagcggctcgggggcgactggaaagcagacgccagcttcgcctgaagcggccacgaggccctgcccaacgcaatcgagctttcgctcagccctcttgttgacggcactatagccccgatggccggtccgtttcgtcatgcccgatatgccctacggctctcggcgccccccaacggcctgcccgtttgatcgctaatccacgattcgacggcctcgtcccatacgggaagatactcagaggtatcgcgaatgctttgagccatctctcctatgggagttttctcccacatatcgatgtgcttgatcttcatccatacggtaacgtaaacggcaacgaccgccatggcgataacggcggcgagccagtagtccgacaacgtccagatagcatatgcaacaccgcataagccgatggggagcgtcagcttggcaaacggcgccttccaaagacgggggaaatcagggtatcgacggcgaaggaccagcacatcgatcatggcaatggcataggagatcatccacgttatgcaggcgacggaaataagggaaagaaccgtgtcggcattggttccattcaggcccacgtatacgatggtaaccgccataagcgcgccggtaaacacaattccgcagatcggcgttctgaatcgggggctgatcttcaggaacagcttcggcatcaagccttcgcgagccatgccgtagagcatgcgcggcagagcggcacagtaggcgtttgccgtcgtgaacgatgcgaggatggtcagcagcgtcataacgatcgaccctccccatccgagcatggcgctcgccgcctcgatatggggcaccgccgatgtcgaaagcgtggcggcatcggtgtagcggaccgccgccgtggcgaaaacggcatcgacggcatatattgcaagcagaccgaatatgagcgcatacggaatattgcgataaggcttcttgttctcttcggccatcggacaggcgaattcaaagcctatgaagaaccagatcgccgtcccaaccgagctaagcgcgaccgcaggccctccctcgggccagaacgaaaggccctccccaacaggtgccgcaacgccggcgagctcgccggcatggaagaatccaagcaagcccaagacggcaaacgtcaccaccatgccaaccgttatccacgactcgaccatgccgtatacgtttacccctacgacattgatcgcaatcacaaccgagaacagcacaaccgctacaagaatctgaggaatgccggtaatcgactcgaccgaagcgccgcccatcatgatttgggttcccccgtcgcacgcaataagcaaaacgtatccggaaaggagggcgaacatggcccagaaccggccaagggccggcagcgtatagtcggatatcatgcctcccccgggaagcatggcggatagttcgccgaaggcgaaagcggctgccatcatcggaacaagcgcgatggcggcaatgatgaacgtcgcatagcccgtcgttccagctagattcccgacggaaaacatagccgttcccgataccaccaaacccaccgcagccccgaaagcaggagcaaacccaagcacgcgtttcagtttctcttttcccatgatcgctcctacggaatagccaggcggcccgcgggagcatacagctcgagggctttcttcgagtacacgtttgcgtatcggtaccagtagtaaagaaggtcgccgacatcgtggccggtgctttgccgatatatgccccacagaaggtaatggtagctgatcagggcgatcgacccgaacatatgcctggtttcggtgggctcgagcggccgtccgaaatacagctcaagcagttcgagaacctcgcgctctgaatgcccccccccccgacgatataggagcatacgtcgtttgcagggtctcccaacccggcgtattcccaatcgatcacgcatgcgccgtcgcccgacactatgatattgctgtcgcacatgtcgttgtggcacatgaccttatggacgccgtcggcctcgacgtagtgatacacccgcatgatcgctttgtcgagctcttcgagctcgaactggctgtgatgctcgctctcctgagcaagctcgcgaaatcgctcgcaattagctgcaatgtcgaaacgccaagggcaagggatatcggcctcgtgcaatcggtgcatcagatcgaaggcccgaagcgcatcttcggtgttatggtattcgaaatcatagcatccatcgacgtagcgagagagcttccagcccttcgacggatcgatcgcaaccgtcgttccgtcgatgccgcattcgtctgccgccttttgggcgaaagcttcgcaatagcggtcgatgatcttgtcgctgccttttccaggatggcgatagacgtacttttcgcctctgcatgtaaacgagaaaatgacattcgtgttcccccgcttgatctgctcgaactcaccgacctcttcggcgccgcaggccaacgagctgcagatgttctcgatgatatgcgaatccatgttgtcgatgaaccggtcgtcgaaacgcttgatctcgtcgatggtatcgaactcgaggatatccccccgctcatagcgcttcacccgagcattcagctcgtcgacgtgcttggcaaaaaaggcgtcgagcagcatatcggcaacatcgggatcgtcgtattcttcttccagaatgactattgcagcgcttttgctacaccgttccacgctccactgctacagcgctccatggcagactgccacaccctaacaatctaaattgccacgcgccccgaaaggggcgcttccttttccgccacaattccgatgggcacaaaagtgcccatcggaccattgcgagaaaggaagaaaaaatggtcaagtacagagaaatacttcggcaaagggcgatgggggtgagtgtcaggaacacagcgttctcgtgcaggtgctccaccgcaacggtaagggcggtgaccacccgcgcgaaggcgcacggcctcgagtggcccttgccggaggagatgaacgatgcggcgattcgagccgtcatctatccggcaaaggagcgatccgatatgtcgaaggcggagatcgaccatccccgcatcgacaaggagatgaaccgtcccggcatgaccatgctgacgctttggagggagtactgcgaggacgccctggcatcgggcatggaaccctacctgtactccgccttctgccagaagcaccgcgcctgggcggccgccaacaaggtctccatgcgcatcgagcgcaaacccgcccaggagatgcaggtcgactacgtcggcgacaccatggaggtgctcgacgccgacaccggcgaggcgcgcaaagtctacgtcttcgtggcgtgcttgccctattcgggcgagatgttcgccgagggcgcctacaacatgagagcggagtcctgggtcgaggcccacgtccacgccttcgccttcttcggcggcagcgtgccgatagtggttcccgacaacctcaagcagggcgtcgtcaagaacaccgtcgaagagctcgtgatcaacgagcagtaccgcaggatggccgagtactacgggtgcgccgtcgtgcccgcgcgccccaggaggccgagggacaagggggcggtggagatgagcgtgagggtcatcgagcagcgcgccatcgcgccccttcgcaaccagctgttcacctctctccggcagctgaacgaggctcttttggagaaggtgcgcgagatcaacgcccgtccgttccagaagcgcgagggcagcagggatgaggtcttcgtccgccaagagaagccgctgctcatcccgctgccgggcaagccctacgagatggttacccgcaaggttgtcactgttaattttaactaccacgtctcgtttgacggatgctggtactcggttccgttcagctacgtcaagcgcgaggtggagctatgcgccaccagatccgctgtttgggtggcctgcgacggcgagcgaatcgccatgcacgagcgcatctacggccctaggggaagctaccgcaccaaccccgaccacatgcccgattcccatcgcgactttgtggagtgggacgcgaagcgcttccgtaaatgggcggccgggatcggcccgtcctgcggggaagccgtcgatgccatcttgaggtcgcgcaagatcgagcagcagtcctaccgctcgtgccgcgcggtgctggcgctcgcgaagaagcacggaagggagatgctcgagcaggcgtgcgccaaggcctgctctctaacgcccaggccgagctacaagacgatcaaatcgattatctcggagatgggggccgcagggcccgaggaccaaaacgccggagcgtatctgcgcggaggcgactactaccggaacttgagcgagggggacgatgaataatgacggcgagccagacgacgatggacaaactctatggcatgaggatgtcggtgatggcgcaagcgtatcgcgaccaggaggaatcgcaaggagtggcagagatgaccttcgacgagaggttcgccatgatagtcgatgccgaatgggacgcgcgccgcatcaacaggaggacgaggctgttgcgccaggccggcttctccgatcccgaggcgaacattgccgatgtccgctacgacgcggatcgcaagctcgaccgcacgaaactgatagagctgtccaactgcacatggataagaggccaccgcaacgtcgtgatcacgggcgcgtcgggcgccggcaagagctggattgcctgcgcgctcggggtggcggcctgcaacgccttcttcagcgtaaggtacgtccggttgcccgaaatgctcgacgagctgaacgtgagcaagaacgaggattggctcaaggcgaagaagcgctacacgaaatgcgacttgctgatactggacgattggcttttggaaaagctcgaggggaaggcggcgcgcgagcttttagagatagtcgaggcgcgcttgcgcagcgggtccttattgatttgctcgcagttctcgccagcaggctggcattcaaagctcggggaaggagcaatcgcagatgccgtcatcgaccgcatagtctatcggtcggacgtcatccatattgaaggcgacgagtcaatgcgcaagcgcatcggctaagagcataaccggccgtattggccaagaggggcgcttgcgcgcccctcgcaatcagagcaacccgcattgctacgtggcagtctgccatggaacgctgtagcagtggagcgtggaacggtgtagcaaaaacggcgcaataagcatccagaagatccatgtagcaacgcgagaaatccttcgtccagtaaaactcgcccacctgataccagtcccccgcagtgccgccaacgccgtacttgacaatgcgatcgtgcgtaccggtgtcaacgcaccactcgtcggtttcgccgtctgcccgcacgcaggcaaagtacgaatcgtacacgtatttcgaaaagggattgagggtgaagtagttgtcggatgagcagatgtacgaattgcggataaaataccgagctgcatagagcgacgacgtgttgttgcgtcgataataatcggggttgaccagaatcttcacgttgaacttatcttcaagatagaagaacaattctttcatgtagccgacgacgacgtatatttcctcgatgccggcctcctgcagctgcctgatctgccgctcgatcagaacttcgccgcgcaccttgaaaagccccttggggcgttcgtaggacaagggagcgcaccgcgacgcgaatcccgccgccatgatgatggcgttatccaccttgtacggcttaaggcttttcaagccttcctcggttacgcagagccgatcgttctccagacatcccatatccctcagctcgcgcacggctgcgctcaccgagccgagggagataccgcaatccttcgcgatctcccgctgcgtctggccctgattcccctcgatggaattcaatacttcgaattgattcttagtcaacatatgatctttgccgctccccgcttttcgcctctatcgctgcgacgaattaatgaccgattagctcagtttattctttgtgttcaaatttgtaaagatgattatttttttgaacactatgggagaacagcggatattgctcgaatcgctacggttgacgcgaaaggtaaaagcgttcgagccaacgagcagagtcatcgatatcgaacccctgcaagcgaacctcatcgacgttatcccgccgatcgcatgcagaatccaatatcgacaggcatttcgatgcccatgccgcagccccttgcgacaagggcaagcgggtagcgtcttccaccagtatcgcaccctccggcacccccgttgaggccaataccggcaagccggaagactgggcttcgattacggctatcgacagcccctctttgaacgaagggaacacgaacgcatcgaacgccttgagcagattcggaatgtcttctctcacgccgagaaaatcgaccgattcgcctatgccaagttcacatgccgcatgctcgaggtcatccgccaaagggccccttccaacgcaaacgagacgagcgttgggaatttcctttttgacaagagaaaacacctcaagcagaaatcgatggtttttcaccgaatcgagcctgccaacatgacccacaagcggaaccgaaacgtcgtatccgtatgcttttttgcatgccaagtgagctgcctggtcgcatcgatactgttcaagggctatgccgtttttcaacaccttgaaattctctgcttggactatccggctgccgaatcgatcgcgacccgcctcggaagagcacgccatgtaataatccgcaataaatcgggtgggatacgacaaaaccctgaatgcaagctgctcgagactgagcgggtagttttgcgcatggctgtgcgctatcgtataccgctttgcccgctttgcctcggaaagatacattgccgcgctgctgccgatatgcccgtgcacaacacgatgctccccatgctcgccgaagaactcgcgaaacgcgcggcggtacgacagcatgttcgatccggtgaaccgcggcacgcgatacagcctaccgcccaggtcttgtatctcttcgtcgtagtcgcagggcctttcttcatgcaccacaaaatcaaactgcacgacgtctcgatcgatcgcgcggtacagattcatgatcatggtttcagcgccaccgcgatccatcgcgccgataacatgcagcacccgcatcataaacgctccatcttttcagcctgctcctccgaccgaagcgcacccaactcggtctctgaaggaatatccgctttttccgaattcgcgcccgaacgcatcctccacagcagaagcgcaagcagcacggcaacgcccaccgcacaggcgcccgcccccgcaaaactgacgccgttcatatcccaggtattcacgcagatgaaactcaatgggataaccacgacaaaagctgcgatgttcccaatgaagttagctctgaaatctctaagcgcgataagcagatctccaaaaaaccagaggtacgcggtcatagccgtcgaaagaatgatgggctggagcagataaacgtacggggcgatgctctcgccaaacaacaattgcagcgcccatgagccaatgaattcgaggacgatcgagcaaacaatgccgacagccgcaatcccggcaacggttttcagaagaagccctctgaagcctttcctgtcgccgctaaaatacagttttggaaaaatatcgagcagaggtccatataaatacattgcccccatctgaatgatgagcgcaggcgaagcgactgaagaatagatgccgagcgacgcatcgccgaatacgaaataaagatactgcttcgggatggtaaacagcgcgctcgccgccagagaggcgattaccgccggaagcgaggtcttgaaaaagaaggcagcctttttccagctgatgcgtattctcagcttttcgaattgacttgctttcggaatatcgtatgcaaacagaacgacaagggacaacgccgtcatcgccacaatggcgatgttgagattgcgcgtaagcacatatgcgccgaaaaagccaacgatcaacgcgacgccctggatgatgaacgattttccgatatagtccattcggcgattctgctggtcgagaccatgcagaatatcgatcagaagaccaaccgctttatatacgaagaacaacgcgatggtaatgagagcgtagggtggacaagtcaggcacgcatacaccatgcaggcgacaaaagccaatccaagcgtaatgcagcgaaatccgaagtactctccgagctcgttttcgtgcttgatatccgatatttgatacgtgcccattttgtaattggcgaaagtaccgaaaatgccaacaaccgacatggcaagcgatagcaaccctgcgtcatcgaagctgccagacgaaagccgcactatcagaacggtcatgagccattggcaggcaagatacgtgagcgatccgacagaattccagatcatgttcgccttgattgaaagaggcttaacacccataggggcccctctcgaataacggatcggctgtcttcgcgaagtccaacgacgctgctgtcatcacaggcgaaacgcctcgcaggtatgaatgtcgcgcttgtctatcgcaggaggcgtttcccaatcgccatatgattttgccaaatactctcggtagttcttgggaacaaaataccggcgatcctcgaacggcacctcaagcggctcgaaccacgtcttcggaagaagcactccagggttatcctcgccgatgaaatcggtgtagtagtcggtttcgcccgtatacgcgttacgggcgttctcatcgattttctgcgccgccttataagggtccatgcgcgagaatacgggatgggcaacgcgtttaaccagcttcgcaagcatcgtcgaacccagagacggatccgcaaccatcaggctgcgcatcaaggccatccgggaacctcgggagaaagccttgtcgtgaggatcggcgacatcgtcaagcgggaaaatatcaacccaaacccccgttgcgtatcgcctctgcgtaaacgtatcgtacacgatcgtgctcgagtcaacgactttcgtaaacggatatatcccgctccggtcgcgataagtggcaagtttgtagcgctcgacgattttcgaggaatcaaagcattctccgacaaaacgctcgtaatcatcgcgcggcattatgatgtccatgtcgtcatcccaggggataaaaccttgatgccgcgccgcgccaaggcagctgccgtatccgaggaagtacgaaagcccttcttttcggcaaatgcgatctatctcgtccatgatttcgagctcgatgcatttcatatcgtcaatggtgattttctccataggtgttccttctggctcgcacatgagaacgaaccgcaaatgtctcagaatccagcggttgcctactcgacggcaatcggcgttaattatattccacgcaattcgcttggctcaagctccaccaaaaccacccaaaacccaacgcccaaaaacggggaacggcaggtcggcgaatctcaaattcaacggtacccggctatcgccaacccccgtttttcccatgcggatcaacggggccctctccaaaatcaaggaccatcggcgcatgattcgttctcagctcgagaggaggcatctccatatacgaaggaccgtaccaggtcttcaaataggtttcgacatcatggggcacaggatagctgcccccctcgaattcgcacggaaccgtcggccaaagtgtggatgccgcaaacgggggatccggcggatacgccattgcagcgaacaaatcgccatcggcgataccggatgccgaacgggccgaccgctcgaacgatttagccatgcgcttcggatcgaacaggatgcggcatgcataatgggcaacgacgcaagccgcgcgctcaactgcgccaagcgcccccttgtggggaacatgcacgctcttcgcgtggtaaagatacgatacccgctgccagaacgtgcagcgcgagaattgcctgcctcgctcccgctcgtcggcaaacacgggatcgtacggaaacacgtcgacgaaaattccctggtcaaacgatgcttctatggtttcctgagtatagaacttcgttccccgtttccaaattttcgcaaacatgggcgcataccccgccgtctcgccgggaatgccaacctcgtagctttcgcccaactcgcgctttgccgcctcgatgaaccgttcgtaatcgtcacgcttcatcccgatatcgatatcgtcatcccaagggatgaacccccgatgccgaacggcgcccaaagcagtccccgaatcgaggaaatactcgatcccgttcgccctgcaaagctcgtcgatcttcttgagaacgtcaagctgctcgagctgcagccttctcagcacgccgtcgtcatacatcatcgccgcgtgctcttctccttcgatttataccgttcgtgccgctcgtgatccctcagcgcaacttcctgggcaagcacgtcgagccgttctttcagattcgaaacctccaccgtgagcgtgaaacatctgatgaacaaaaaggcgataacgcaaaggaagatgaaattcgacggcgactcgatgccgagcaagttcgagaagaagaacacaacgctcggaaacaccgccgcgacgacgagagccgctgcgaacagcagccagaaaaccgaattcgcaatgctcatttcggttttcttgagcttgcgcagcacgaaaatgaaaacgatgaccgcgccaagcacgagaactatacggtagttgatgctcatcggcacgtcacctcagccattgcacgatcgttatcgaaacgaatgcgcgcgccatgtacataatcgatttcgagaagctcagatagctttcgcccgtctcgcgatcccgcatctcggcctgcacctcaacgaccttgaaccctttgcgtatgaggaaagccaaggtatccggctcggggccgaaatcagagcgcttaacgaactcggcgattgcccgcttgttgtacatgcgcatgcccgaagtcggatcgaacagcttcttccccgtcgtcagcttaatgaggaaagaaatgagggccgaccccgccatacgtgccgaggcgcccttcttcttcgacacgaaacgcgaaccgataacgatatcggcaccctcgctcaccagcgcatcgagcatgggctgaatgtattcggggcgatgctggccatccgcgtcgaactggatcgcgcagtcatagccgtggcgatcggcgtatttcatccccgcctgaaaacctgtcgaaaggcccacgttcacgggaagatcgaggaaattgaacccctcttggcggcatatcttccccgtatcgtcagtcgatccatcgttgatgacaaggatgtcgaccgtcggggctacgcgctgcagctccctcactgttccaacaatgcaatcctgctcgttgtatgctggtatgatcgctagtagtttcatggtctccattataatctaatatgatgcatcggtcgcgcatctgcgcagatctgtgcagattggattcgccgacgtcatcggaacggtgcaacagggccgatggacaagtataataccgattcggccatcgaacgccaggccgcagaaaagaaccccacgaccttcaggaggagcccatgccgagcgaaagaaaaccttgcgtttgcatcttctcggcactgtacccccccgccgtcggaggcgtggaaacctacacggcaaatctcgccaaggcgctgcgcgatttgggctaccgtgttatcgtagcaaccctgaacagccaaggtcttgcggctcgagagtcggcggacggcatcgacgtggtgagatttccctgccgtgctcttcttgggggacgctaccccatcgcccgcaagaacagcgagcacagaaagctgcaatcatggcttcgatcgcaagccgtcgattacgtcatcgtcaacacgcgcttttacctccattcgcaatcagggctttcgttttcccgatcccaaggcatcgcgcctgtgctcatcgaacacggatcggctcacctcacgatgggaagcccgctagtcgacaaaggcgtcgaattcgtcgagcacctgctaacggcggcaggcaaacgattcgacgcatcctattacgccgtgtcgaaaaaggcaagcaggtggctcgggcatttcgggctcgtctcgaacggcgaactgtacaactcgatcgatgccgacgcatacctgaaacaggcaagcgagcgatcgttcagggacgaactcgacatacctgaaaccgacctcatcgcagtcttcgtcggtcggttggtacctgaaaaaggggtgcaagccatagccgaagcggcccgcatgctcggcgccgacagcgacgtgacatttatcctcgcgggagacggacctctgttcgacgagatggagaagcactcttccaaaaagctgcaccttctcggaaagctctcgccgcccgacgtatcggccctgctggcgcaagccgatcttttctgccttccctcgcgctccgagggtttcgccacctcgctgctcgaagcggcggcatgctacacgccttcgatcgtcaccgacgtcggcggggtcgacgagctgattcccgatgccagattcggcaccgtcatcgaaaacgccgagccgcgaaccgttgccgaagccgtgcaccaggcggcggaacatcgcgaagcgctcgctgcgcaaggggcatgcgtcggaaagctcgtcagaaccgaattctcgtggaagaaaaccgccgagagagccatcgaggcatgcaaggcggctcagctatccgattgacggccgcaagcgaaatcgtcgccggcatctacggcacggcaacctctcgaacgcagatcggcgccctactcgacgacggggcgccctatcgagatatagcgcactcccgaccccctgaacgccgccgattcgtacacgttgcgcccgtcgtagacttccgccgcccccatgagggcggcgtattcctccggctcgatcgatgagaactcctcccattcggtgaggatgaatgccatgtcggcgcccgcaagcgccgctcgcgcactttcggcgtattcgacaacgcccggctgcgccgggtagcggcgttcgaacgccggcatgccgcagggatcgaacagcaccgatacagcacctttgtcgcgcagcattccaaccacatcaagcgagggggcatcgcgcagatcatcggtattcggtttgaaggtaaggccgagcaccgcgatcctcttgcccgcaagcgagccatgccgatcctccgccttggccacgagcagcgtcttttgagcggtgttcacttcgatggtcgccttgatggttttgatttcatggccgtggcaggtactcagccaatgaagcgccttcgtgtccttcgggaagcacgatcccccgtacccgatgcccgcacgcaggaacttctccccgatgcgcggatcggcccccatgcccgccgcaacgttctcgatgtcggcgccaaccacatcgcagaggttcgctatctcgttgatataggatatcttgagggcgagaaagtcgttgctcgcgtatttaaccagttcagcgctacaaagatccatcaccataacaggggcgtcgaacggacggtacagctcgcgcatgagagaggcggccttctcgctctgcacgccgacgatgatgcgagagggatagagcatgtcgcgcagagccgttccctgcgaaaggaattcggggttcgagacgacctcgaagctccggttcgcacacccatccgccatttcgtcgaagtactcctggatgcgcgcgttcgttcccggggggaccgtcgatttgatgacaacgggacagcccgcgctcctgctttcggcgatctggtcgcaggccgccatgacgtaagacagctcggccgacccatccgccttctccggcgtaggcaccgccacgaacaccatatccgcgtcggcgtacgcatcgcggtaatccacggtgaagcgaaggttttccgccgactcccccatgagcttttcaagtccgggttcgaaaagcggcgatttgccggctttcagcatggcgatcttggcctcgtctatgtcgagcccgacaaccttatgcccctttgcggcgaatacgaccgcggccaccagcccaacgtagcccgtaccgcatacagtgatgttcatctgtctcgcttccctcttcccaacgcgtccttcaccgcacagggaacagccattacggcctttcctacagcatacgttctcgactggataatatcgcgcttctcctgttccatccgctcgatcgcctcgtcgcgccaggcgagttctcgctccagcttttcgatatgccccttgagccacgaaacatcgcttttcgcgcgcgcaaggtctatatcgagcagcagaccccgacggatggcttcgaagcggccggaccgcaggatttcggcggcagctcgcccccgctcgtcaatgtaaaacccctcttctgcatcatcgggcaaaagcggcgtaaggttcttctccatatcctcgagcaagccatcacgcgcatcgccatcgagcgtgtcgaggttccagagcgagaaatcaagaaaccaattgacgtaactgcgctcgaacgtctcgtataggcccttatccctaaggccccgaccgatggcaagggcggcttttcccgcattctcccaagaccgggaccgcgttctttcaagcgaatcggcattattggtacgatgcatgacgagcgcatcgccgacaaaggcgattcgttcggccagtataagggacatgaacacgaagtacgcatcgtttgaggttctcagatcttggaaccgaaggtcgtgctttcgcacgaactcggaccggtacagtttatcccatggccaccctacgcagaatcgaaacatcacatcctgaagcgccacccccgaatagaccgatccttcctcgatgtagagcagcgaaaaatcgatcggttcgacgcgctccgtcacattatcgtaaaaattggagcgacacacgaccacatcggctttcgtatcggaagccctcttcaccatcgattcgatcatcgcggaatcgaagaaatcatcagcgtcgagaaaagcgacgtactcgccggacgcatgtgaaaacccttcgttgcgggcaacccccgcatagcgattctcttgggtaagaaccgttatgcgggagtcctcgcgcgcatgctcgcgaatccgatcgagcgtatcgtcggccgatccgtcatcgacgacgatgatctcaaggttcgaataagtttggcatcggatgctatccaggcaccgatcgatgtattcggcggcattgtaagccggcacgaccaccgataccagcgactccgtcgaaactcccgctcgctcccctcgcattttttacctaccttttcaaaactcttctgacaatgatcttcagcgtatcgagaagcccgtcatagcgcatatggaaccgcagcagatcaaacgcacctgcagcctgcgccttctcgtacgcagcctgcttttcaacatgataattgtagttgttgcaatagccttccggatcctccatgatcatccgcagatccgcccattcctcgggccaaaacagcgattcatccaactcgcctcgggcttcggcctcgcgatactccttcgaataccgctcgagaaacggcatctggaattcgggagccaaaagcgagaaggaaaaattcagattgtgcattttcttatagtggaagattcctatgaagcgctgttcgagcgcagggttttctgcgagaaaccccctgatccacgcatactcgtcaggcatgcagaacaccttgttgttttggttgatcgacgacgcggcgttatcctgccgatagcagtaaaacgcctcgggcagagcatatatccgctttgcccagcaaaacgtctgaaaccagaatccgttatcctggtaagaggctccagggctctcgtgatgcctgatgttatgcttgcgaatgaaatcggtccggtaaatgcccgtccagttgagcatctgcatgttgaatacatcgaggttgtcggccggattcaagaccgtattgtaatactcgctatgcggcgtaagcttttcctcccagaaaatccgctccccgtctgcccccgttttgaacttggtaaaatcggagcggacaaaatcgacgtcattctcccgagcagccgcgtaaagtttctcgtacatggtaggcaaaatgaaatcgtccgactcgacgatcccgatatattcgcccttcgcgatatccatgccccgattcatactgtgcccataccccccgttgggcttgtcgataaccacgattcgctcatcgcgtgcagcgtattcctcgatcacatcgagcgtagagtccgtcgatccatcgttaacgcaaatcacctcgatgttgcgcagagtctgtcccaatacgctgtcaagaacctcgggtagaaaggcttcgacattgtagcaggggatcacgaccgaaacggccggacgcaccgactggctgcttacgctcatctctgttcctcgctctcgttgcaaccgctctcgacggcgccggcaccaacataggaaagaagggcgccgcggtctttcgcatggcgtttcccgtcttcctcttctccctttatttttcgtatcgcccagtaaaccatatctccaaaggccgatttgtatccgcgtttctgcgcttcggcgaaaaaggcaaccacgtagctgagacggggatgcttatcgtttctccgaggatcgcagggcaccgctccgcccaactcggcggcaaggctcgcataccgctcgtggcaatcggccgtaagagtgaagtatccgacgccgtggtgcgcaagctcgatttcagggaagcccccgttcacgaggcgctcgatcagcccgcggcgcacaggtcccgcaggcagggtttcgatgttccaaagagtgtagtcgaacgcccagttgagaaacccccacgacatgcgctcgtagcgcacgggatcctcctgcagcttctctttcagcaggcaaatgccatggtagaactcggtcgggttcgcagtgcgggaattcgaaaccgatcccgaacggttcatgcgatgtttgatgagcacttcgtcgtagaagctgattcgccgcgcaagcacaagcgataaaaatacgaagtacagatcttcgctgttgctcataggaggaaaccggagggcgttgtcttcgacgaacgaccgtctgtagagtttgtcccagggccacccgataaacgccgtcaggatgtagtcgtacatatctgcacaggaaaacggatcctttgcgggaatctggtcgactttcgcagtccaaggagccttcgaaacggcaccggtggcatgatcgtactcgaccgatcggcatacgacgatatcggcatccgattcgaccgcccgaccatgaagcttttctatcatctcgcaatcgtatatatcgtcggagtcgagcagcataagatactcgcccgtggcgagatcgattccccgattgcgcgacaacgccggtccagcgttgtcctgggtatatacggcaacacgttcatcgcctgccgcatactcttcgagaatctgcagagatccgtctttcgacccgtcgtcgatgcatacgacttcgagatcgcgatacgtctgggacaaaacagtatccatggtttcacgcaaacatgattccatgttgtacaccgttaggatcaccgacactttatccgccaaaccagctcctcaatcaaccaacagtgtgaaacgcgcgcggtactgaaaactgcaccacgcatcgaagtacgatcttatcaattcacccgcttgcagccaaccaaaacgcacagggaatcgcctacttcactttttcagcactctcaggcgataccgtcctccgagagaacctgcccagagcgccaagagcgcctatagggccctgcgcccgcaagcgaacgacgagctcatgcgcgagatgccgcgcatagggcacaggcgaaatgcgggcgttcccgtcgccaccagtctgctcaaggtagaatcgcttcttcgacggagaaagcttcggatgatcgagcacgagatccgcacgcatcgcaccgagcagctcccgtatgccaacacgcaccgtcggaacctcccagccaccttgctcgactacgatatcgatgtagttgaagccgcgttggtagtgcgcatgccaaacatcccggttttcgattccgcaggcacgcaggctctccgtcatctccatccagcgaagcaagggcaaagacagcttcttctcatcaaggggcgcatcgccttttcggggcagttcgtttcggtagcagtagtgcatcgaatcaagatagacgatgcgcttcgcccggcaaagcgtgtcgaccaaaaacgggttatcggcccaccccgcaccagggtactcgtgaaagcgaatgccgttttcgtccaaaaagcttttccgatacagagccgaccatatcgaaggatgcccttcgagcagttcggggacgccctcgatggactgcggttctctggttgttttcagccgtttgtacaggtacccgggaacgacccgttcgcttaggggatcgtcccagccaaccacatcgaaccatgcctccttcacgacgtccgccggatgctcgaaggaatcggcgaacgcgagcaaatcctcgaacatggttggaaggaggtaatcgtcgggttcgacgatggcgacgtagtcccccgaagcaagctcgatcccacgattgcatgtggcgccgtacccctcgttttccttgtcgacgacgcggatgcgggcatcggcggcggcgtggcgcttcatgatggcaagggaatcgtcggtcgatccgtcgttgagacagatgatctccatatcgcgcgccgtttgatactcgatgctttccaaacactgatcgagaaaggcggcgacgttgcagatgggaacgattaccgatatacggggagcgtgcggatcggccatgctatctccccttgattcgagcaagcttatccgcgtcaacgccaaggtaatgcaaaaccgcagcctgacggtaccggcgagcagtcagcgccgcgaaccgagggtggctcttttcgagccacaggcggaactcccgagccctccgcatgcctcgctttcgatccttgtcgaatatcagcaggacgttatagtgcgtattgacgatcagctgcgccttcctcgtcacataccgcccgacaggctcgctgaagccgtcggattcggcgaacaaaagcatttccctgaccaccgtctcgtgatgcgcgtagcgcttcacccagttctcggcggcaacgctctggttcgcattgcccacgagatactggtacagctcgatcggcagaaacgtgaccgtattcgcaaagctcgtcgctttgacgatgtattcgtaatcaacatagaagatgccttcgcgtatgcggatgcccctctttcgcaacagttccgtcttggtcgtaagggtgtgaatggtaatcgaagattcggtatcgcgttcgttgcacacgtcttcgaaccgaagctcgcggtcggtctcgatgtaatcgggaaagcggataacatcgccttccatcgaagacatgtcgacttcgcgccgctcatcgaccacgatatcggagtcgatgccgcgaaggcgctcgagcagcaagacaaggttttcggttgcaacccagtcatcgccgtcgacgatgcgaaagtacttccccgtcgcgtgcgctatgcccgcgttgatgcccgaaccgtgtcctccgttctccttgtcgatgaggcgaaaaatcgaggggtacgcagcaacgaaacgctcggcgatctctttcgtcgaatcggtcgatccgtcgttgacgatcaggacttcgacgtcatcggaaaaacggggatcagcgaaagaggaaagccctcgctcgagatacgtctcgacgttgtagcagggcatggccaccgtaagaagcttgctcacagcttcgcctcctttcgatcgtatcccttcatgcggttcagcacgccgaattcgaacctcagcaagccggggcaatgcgcgagttgccaggcagcggcctttctggcaaaggacaggggggatttcatcaatcgcggatagttgtccttgaaatcgccgaaaagccgatcgagagccgaggattcgtcgagcagcggatccgtcacgccgaagcgagcccatttcaccagaagggaaaacgagcttttcgcagctcgatcccgcgcgagctcgagcaccttcccactaccgaaatcttgggcgaatccaaccatgagacggtccgcctcaatcagatcgaacccgcgcccatcgagcccgttgtacgatatgcttccgagattctgaaaataaaagtattcgacgcgattcgaaacgactacgcgcttcgccttcgcaagcaatttgaagttgcccacccggtcctcgcaggtgagcccttcgggaaaacagcccggcatgcacgcatcgaacaggctgcgccgatacaggcggttccacaccgcgtattcctcccgaaaaagcatttcggcaagcgcttcttcggaagagagcactcgcagggattccaccacgtcttcgatcggctgaggcttcgagcacagcagatactgaacctgcgctacgtcgctttcggttttctcgatggcgcgtaaaagcgtctcgaacatggtgggagccgcccagtcgtcggcatcgacgaatccgatgtagcgccccgtcgaggccgcaacgcccgcattgcgggccgcagacactcccagggcatggccgtggcgtatgacgaccgtgcgatcccgcctcgccgcaaaggcttcgcacaaagccgtcgatccgtccgtagatccgtcatcgaccagcacgatttcaatatcggcaaaggtctgcgcggcgatcgaatccaggcagcgctcgagataagcggccgcattgtgcacgggaacgataacgctgacaacgggaaagtccgccatgttattccctcatggagcgatatgcagcgcaaacttcctcaacaggaccgttcatgcgcaggtggcccttctctatccagatcgctttgtcgcatacacgctcgacctgctcgatgctatgggatacgaacaaaaccgtcgtattgtgctcctcgatgagctcgctgatgcgcttctcgcatttctcctggaagaacatgtcgccaaccgaaagcgcttcatccacgatgaggatatcggggacgatgaccgtggccaccgagaatgcgacgcgcgcgatcatgcccgacgaatagtttttcatcggaagctcgaggaaatccctcacctcggcgaaatcgacgatctcttcgaaatgctcgtcgatatactgctttcggtacccgagcaacgcaccgttgaggtaaatgttctcgcgcgcagaaagctcgaggtcgaaacctgccccaagctcgatcaggggagcgatgttgccgttgatgctgcaagcgcccttcgtgggatcgagcacgccggcaacgatcttgagcatagtcgatttacccgatccgttcgttcccacgatgccgtatacatcgcccttgcgaacctcgaagctcaccgaatcgagcgcaacgaactctttgaagaacaactcgcgcttcgcgaatgcgatgaagtactccttgaaactgttgagctgctggctcgccatgttgaacaccatggtgacgtcgtcaaccttaacggcaagatcgagcgcatccatttccgcagcattcagcggacgaattgtattcttgttctttttcatatcggcagccccatacgactagacatagaggatgaattttttctgagacctgctgaacaccgcaacgccgaccgcgagcgttatcgcgcccatggccagacacagcaagttcgtttcaaggctcggcgcctcggcccaaagcgcgatctgccggaagtaggtcacatactggtacatgggattgaactccataagggtgcgcacaagcccgggaagaacctcgacaggatagaacagcggcgtcgcatacgtccaagcggtaagcacgacgccccacaggtgaatgatatcgcggaagaacacggcgagggatgcaaggatcagagcgagccccgtgcagaacatgatcatataaacgagcagcagcgggagaaacaggatatcccacgtgggaacaacctggaagtacagcatgacgataacgaccgcaacaagcgagatgacgaagttcaccagctcgaagatgaccttttccagagggaaaaccatcttgttgatgcggattttcttaatgagggacgccgagtcgagaatcgacatcatgccgccgttggttgctgccgacatgaagttgaacagcgttgttcccagaataagatagagtgggaagttctcgatgttggccctgaagacgaacgagaacaccgccgaaagcacaatcatcatgagcaagggattgagaatcgaccacagcacgcccaagacgcttcgacggtattttagtttgaaatccttcgtcacaagcgaagacaagacgaagctgtcccgcttgaaattgaagtttgcggtattcataaacgctgcaagccttcgctttcatccgaccctcgaaaaagaataaccaagcaatcatagcatgcaacccgcacggcctttcaggaatccatgactcgcacgcaaggacatgagggctcgacgtttgaagttcgatgcattctaccagagccttcttgcgcttcgcgttccgaacgcctctaccaaaaccagcgaatgacgaacatgagcgacacgacgttgatagcaagcatgaccaccgcgaacgccttcatgggaatcttttcgaacggcgttttcctcgttagcataagggcgaacagcatcaggaacaccggaggaatgaagtagcgtccttgcagccaggttatcggaccgggtccggagaagccctcccccagcgcaatgtagagaagcagcgactcgagcaggccgagcacgacaagacccgcgcgctcccaacgtttgaagcgaatcctctcgtcgaagctcgccaaaaccgaaaggcccaatgcaaccaagaaaacaatccaacacacgggaacgtacacggaaacgatcgtgccggcatggttcatgtacggccagccaaggttgcctcccgagaactgccatacgacggtcatgccctcttcgaaaacggttgcccccaaaacgccgaggaacgaatcggagcaaatcgcctgagcggctttcgctacaagcgtaccgtatctgagcgagatgaaggcaagggcccccgccgcaagcaccaaggcggcaatgggtacggcgatcctcaccgcccttgtcttgatcttggggtaaagcaccaccgaggatagaaccaacggcaaatacgcgtatttgcacacggtgaccaaagcgatgaaggcagccagcacaacccattctcgaacaggcagagaggacctctcgtcgaagcgcatggcgatgagctgaacgacgaacccgaagatggcgatgttgcacagcgcatcgaccgagcatgacgcctcctgctggagaagcatgggattgagcaggaacacgaatgcgaacttcctgccgaacggcagcttgccgatcatccagtagcacgcgaccaggtacagggccgcattggacaacctagccgcaaaaatcaaaacgtaaccgtttatgccgaagaacttgcccacggcaacaaccaaggcaggggggaggtagtttaccgtcgaatacgaggcggcgcaatactccgtctccttggtaagggaatagtcgaaatcggcagacataaatccaccgaggacgtcgtaggaaccgatccaggtatacgcatcgagcagctgggcgggcgtcgtcaggggacacgtggagcggttgtcgaaaaccctattgatgtgagtaaactcatccggcactgcaaaaggcatcataaacagggcaaatccaaccaaaagaggagctgcgacaagcacgaacaacgtttggtcttttctgcatgccctgccccacagcatgaaaaacagcactatggcgaaagccaagaacacaacggccaaagcagtgtcgaaggtaaaccatcccgccccgtagtgaaagcagatcgaagcgagaagccccgcctccccgacgacgatgcataggaagtacagcgaaaagagtatgccgtttttcaaccgatcgttgcgcatgcccgcttctggaaaatccataaaaccccatctgaatattgattctagtaccgcgccagtcattgaaaatcatgctattacatggcatcgttaggataccatacccgcaatcgatgcccggcaagagcggcacggcgccggttcgaatcagccgcttcgggcgcagcgccctaaagcgtttccgcaactccgctagcgataccgcggcacgtcgaagcggaggcccgccttatccatggggatgcggttgtgggtgtagcaatcgtacatgacgctcgaaatgccggtagcccaagtgcggctcgtcgcgtattggtgccagacggctcccgtggaaaccgctctttggacatcccacttcatgcggtacagggtgttttggggtcccgagacagcccccgaagccaccgtgggcttatggtagttgttggatatccacttcgcggcgccgaggatcgcctttctcggcgagttccacccctgggtgatggccatcttccttcccccgctcaagggggaattgtcgtaagccccgatgccgaagaagttgtagtacgttcccgcggcatagcgctttccgtcgatggtgccgccgccgtaataatagcctttcgccaaatcagacgtgccccagccgctttcgaggatggcgttcgacagcaggtacacctcgttcatgccgtacgcgttcgccgcctcgatgaagtactctccgcatccggccagcatgccgtttctgcccttcgcctgcgaagcgatgaaagaatcgagctgggaggccgaaaccattcccgaatacccgtcggtcaggacggcgaattggtagtagtatctcgtgccgaaggcgaagttgttaggatccaggctttcaagcgcttcggctttgttgtacctcgacgcgtatcccgccactgcggcaacttcgagatcggcaagcctgctcagcgtgatgccgtaatcggtataggatatcttcgcaaggttcaagctcgaaacgatcgcaacgcgtgcgcccgaagaaacggacggcgtgcccccgaagaacttcacgtagcccacgcccttgcccgaaagcgctctcgtcgcatagccgcaccagccgtcatcgaccagaaagagagcggagccttccctgccctgcagggctccgccgccgagcgcgtcggcggggttgccgccggttgcgaaggaagcgccatcccatttcagatagccgttcgcaacgccccagcttgcaacctgcgcactcgtatcgtagcgatcggcccccgcgaagcgcttcgcgcccccggcgaccgacgaagcgaaagcctcggcatcccgcgatacacggttcgtgtcgcccatgacgagcgcggcgccgaagggcgcacgggctgcggcctgcgcgagcgctgccctctggacatcgttcatcgagcaggattcgtcggtcaggaaaatcggcgctcgggcgcgaaacgccacaggggaaacagacaaagcgtcggagggagatacgcccgaagccaaaatgacgagatcgctcttccaaagcacctcgcccttggcgttgcggctcgcatcgaggccgtagtcgtagatcagcatctgggtttcgaaacgatcggcgccgccgagccgctcgacggcgatgccgagtcccgcaatggcgtcggaagccgccttcgacaccgagttctcgtcgccgacgataacgactcgttcgacgccgagcgaaacaagcgcctcggccgtgcttgtcgcgagacccgttttcggcgtcaggagaacagggcaatcgagagcgccggcaaggctcgacgaagagagcgcgtcgggccagccctctccccccgccacgacggcgaagcgggaactctgccatccgtaggcagcttgcatggctgcggtttcgtagcgatcggcgcccgagaagggtcgcaccgcacccgcagcggccacttcgtttacggcaagcgcatcgagggagagcggcgaaacccgattctcccgatcggtggcggaatccgaaaggagcgaagcgatctcctcgtcggttatctcgcttgcatagggatgttcctcgctctgatcgtaggcatgctcgtcagacgaaaaaccgctctcagcatcgctttgatcgaggggttcgcgcggggaagacggatcggcctcgccgccgaacgcctcgtcggatgtttccgaggcacccgattcaacgccttccggtgccaattcggcagacgggaagccgtcgtcggcatatgccgatgcaggcactgcgcctgcgatcaaaagacatgccagcagcgcctgcagcggtttgcgaccgaaaaagcttgcactccgattcgtcatcgggtatccctcccacacattcgttaaccggcgatgcccgcggcgattcccgacgcaacggcatcttttcttccctggtatttgccgatatcgcctgcattgtcgatgaagcaaacctcgagcagaaccgccggcagcttgcctccgcacacggcgaactcggcacgcatcttcccccgatccttcaagcccatcgccttgacgagagcaggatggaccttcgcctgtaaatcggctgatttccaattcgcattgtacgtgtgaatgtaagactcagtgcccgaaccgccggctgcattgaagtgaatggagatgaacagatcgcacccgcggttgtaggcatcggtttggcgaagcttgtaccagccccccgtggtgtttacgtacacatccatgccgtaatcgttttcgagcttcgcgccgacccgtttggctagatcctcggtcagcgaccattcggtcaggccgttgccgcttgcgccgtaatccatcacgccgttgttgctcgaattccacccatggccggcatcgatgtacaccttgagcccggggatgtccgcataggtcatgccgctcacattgtcggctatttccatcctgatcgatccggataccgaatagcggtcgccgaacaccttgaccgagctcaccgctcccatgttctgcatcgcatagccgcaccagccgtcatcgacgagaacgagcggggatgcctcccgaccctgcagggcgccgccgccaagcgcatcgagcggcttttgccccgtcgtgaacgcaacgccgttccagcccgccaaaacccccgcggacacgccccatttcgcaacccgaacgctcgtatcgtagcgatcggctcccgcaaagcgctcagatcccgccgaaaccgatgagacgaggctctcagccgccttcgatacgcggttcgtatcgcccatgatgagcgccgagccgaatccgccctgcgcgcccgcctctgcaagggccgtctgctggctgtcgttcaacgagcaggctgcatcggtcaggaacaccggggcgcacgaccgaaacgcgatcggcgagacggatagcgcgtctgagggagacgcgcccgaagcgacgacaacgtagtcgcccttccagaacccgcgatccaaaccgtagtcgtagatcagcatctgggtttcgaaacgatcggcgccgccgagccgctcgacggcgatgccgagcccctcaatggcgtcggaagccgccttcgacaccgagttctcgtcgccgacgatgatggcatttttaacctgaagcgaagaaaggacgttggccgtacccgaatcgagagccgctttgggcgcaagcagaacggggcagtcgagtgcccccgccaaactcgatgccgtcagagcatcgggccagccctctcccccggcaatgacgacgtagtcggacgcctgccatccgtaagttgcctgaagagcggcggtctcatagcggtttgcaccggaaaacgacttcatggcgccgccctcgaccgccgcgagcggctccgccgagcgcgatgcggcctcctggtcttcgggcgataccacatcaccgctttcgatggcggccgcgatctcttcgtcggagagaagcgattggtcgccttcgaccacagcccacgcaggctggataccgactaccagggtaaatgcgacggttagggataatgcagctgcgaagaagctgcttttgcgttttcggttcatttcagcctcgtgtgtttgatcgggtgcgttttgcatcggattatagcatgactaaccgaagcgagaacaaccacctaatacattccctttttccgacgcctcggaaagcgggcaagcgcatgcggccgctcggacacgctcgccttcggcgcgttcaatcccagtaaaacccgaatcgctcgatatcgtcttccgtcagcgaagagccgatctgcacctcgatgatatgtagatcgctcaaagccctgataccgtgcagcgagccgcgaggaatgctcaccgcatcgccttggcgaacggggcgaacatcaccctcgacaaccacctcgccggtaccatcgaccaccgtccatatctcttcccgaagacggtggcgctggtagctgatctggcttcccgcgctaatcctcagatacttggtaagagagcgggcgcccgaaccgtacacggcgtgatcgagcacgcggtaatcgccccagttgcgcgcttcgtacatggcacggccttcggctgcgtgctcgacgtagggcttcatgctcgcacttgccgccttgtccgaaaccagtatcccgtcgggcgttgccacgatcacggcgttctctattcccaaagcgaccagcggtatgttcagttcgttgataacgtgggtgttcgggatgtcgttgctgacaacccttcccgcttgggaatcgcgcatctcttcggccagggtattccaggtgccgagatccttccacatgccgtcgtagctcacaacagacaccgaatcggcctgttcgaccacctcgtaatcgaagcttctcttcggaagatcgccgtacgaagcagcgagatcgtcatacgatgtcgcctcggtgtagcgcgcggtgatggcgcggatgtagccgagcctgaacgcaaagacgccgcaattccataatgcaccttcggagataagccgttcggcatcctcgcgcgagggcttttccttgaacgacgccacgcgcatcgcagctcccgcttccgcaaagcttcggggatcgggcactatgtagccgtacgactcggaggggcgcgttggcttcacgccgagcagcacgatatccgaaacgttcttccgcaccgcgtcaaccagcgtgtcgacaagctcgaagtagctatcctcaacatacgaatcgatgggcatcaccacaacgggttcgtcatcggacaagccgcggaccgaatggagaaacgagccggcgagcatgatcgccggagccgtatcgcggcgactcggctccacggctatgccgtactggccttccacctgagcctggatcgacgatacctgcgaagcgctcgtagctacgaggatttccgtcttcggcgttgcagcgcgaatctgggagacgaccctttgcaccatcgattgggagttgccctccttgtcgcgcagaaccttgaggaactgcttcgagcgcgcttcgttcgacaggggccacaaacgggttcccgatccgccggacagaaggacgacggtagccatcggcgtcaccgccccagcaggcggcgcgccgcgcgccgcgcaatgccggcgccttcgcggtcatccaccgccgaagccgtttgggattcgcgttccgagatagcttggtgcagcaggttctccgattcggggtaccgctcgaaaagcgttccgagtatttcgttgttgcggcctttcacgaggttttcaaggtacaagccgtcctcctgcgtgccatccacatacgtcaagcccgcatgcacatccgtgctgaccacaggcacgccaagcctgagctcatgaatcaaaagccacagatcgtccgccataagcgatgtatctctgacatcctgctcgccgaacacatcctcgtcgaatatgccgggaggatacaaaacgccgccgacgccggttgccaagagatcgtggcgagggacgcctcggatgcccgcctgttcgagcacccaatcctgataaggcgcgatcgcgccttcgccgtttcgagttacaagatgggtccgacgggctattaccgccccgggatgccggtagtgggcctcgagaagatcctggagcagagaaagcgagtagacgatgtcgtcgtctatcgtgacgatgatatcgtcggggttttcctgcatggcccaaaagtacttgttatggggcttcaagcttcgtttgcaccatttgatctccaagccaacccgctcgagatcggcaagcgaccccggaagatcgttcttcgaggaaacctcgtcctcggcaagccacagctgaacgctatcgggagagacagattgccgaaacagcggctcaagcgcctttgcagctgcctcgaacctcgcaggatacgaggtcatcgatacgattaccttcggaaacgacatgcattgcccttcgacgaaacaacgaacatcggcctattctagcgcattatcctcttcgacacagaaagccctcggtccgttcggaaaatcgcctcaagcgagcctgtccaaaaccgcctggcgaaccgatgcgctgagcgtctcggtggatccaagccaatacacatgactcacctgccccgaagacgcggcggcgtcaaccgccgaatacgcgttcggatcgacgaggagcagcaccgagcgcttcaccgcgcacagcggtccgcccgccagagcatcgggaaacttcgatcccgtcgcaaaagcggcgttatcgtacgaaaacgcgtagtatcccgaatcgcccgacacgatccaacgcgcgatcgccgccgacgtgccgtagcgatcgtccgagtatccgttgttcacgccgccggcgagtctgacgacctccgtcgaagtgcccctcaacgcgctttcaaccttgcccgaaacggaatgaacgcttcccacgataacgacgcggtcgtacctcgacagctccgcaaccatcgaagcgctcggcgccgcatttggcgcaatgaggaacaaccccgaacgggaggcggcgcagtaaggagatatcgaaagggcatcgggatagttgtcgctgcgagcgactatcgccgtcgaactcgtcgctcccagctgcgacagcgtagcgcgaatgcgatcggcggtatcgaaacggtccacacccccgatgcgaacgcacgaggcgacaaggcccgacacgctggattgcacgcgcgccgaaagcgagttccggtctccgatgagcaccgcctgcctgatggaaggagtgctcttcatataattcgacacagccggggaaagcgaagccgaatcgctcatgattatgggataacccaatgctccggcgagcgacgacgcggccagcgcgtcgggaaaattgtcagatcgcacgatgatgacgcccgcagggccgctcgggtactcttccctcgcaatggcgacgctcgtagccacgcgatcggctcccgatagctcggtcgacgtcagggttttcggttgctctggcgacacgccgagcgcgctcatgacggcagccgaagcgtcgatcttgcccgccccgtaatacatgtcccatcctggtgcacctgcatcgacggcggtcgcgtacaggatgtccctaacttcgctagccgaaagatgggggttgaccgacaacatgagcgcgcaaacgccagaaacggtcggcgcggccatggaagaccccgatttcatgccgtagggagttgcgctcgtgtagagcgtgctgtatatgttcgtgccaggggccgcgatgttcttccccgcaccgtagtcggagcggtaatcgatcgctccgttcacgttgtaccacgtcacggatacgacgctcgaaaaatcagcaggatacgacggctgcgaccctttcgatgtgtccccctcgttgccccccgcgccgaccacgacgacattgcgggattcggcaaccgacatgctcgcaccgagcaacggatcgtagccgtacgtccccatagagatgttgacgacgcgtatcgcacggctcggatcgctttcgttgagcgagatgatgtagtccatcgccttgatgaagtcggccgtcgtgctcttgcccgcatacggccccgtcgtatggagaacgttgacgggcaccagttccgcgttgaacgacgagcccgccacgccgattccgttgttcgcctcggcggcgatcaaccccgccacatgggttccatgcccatacttgtcgatcgcagccgacgctccccgctcttcggtcacggtgttgtaagcgctgccgagatcgaggttgtttaccaggtcgggatggtcgatcttcacgccgctgtcgattgtggcaacgcgaacggtcttgccggctttcgcgatgctccaggcggaaaacgcgccgatatcgtcgagatgccaccagttgttcctcgtctgctgaaacaccggatcgttggggatgtactcgtcgtccatcgcatacagatagttcggctgagcgtgggcgatttcatccgattccatgagctcgtctatcttctgggcaaccgtcatgccgtccgcaaccgaaaccgcaacgacgtccctgccttcgaccgacgcctcgtcaagaggttcgacgggcgtcacgcccgaatcggcaagtccttcctcgacttcttccggagcgccagccgaatcgagaacgacaagcacctccccctcgacgtactcgctgccctcgccatcctcggatatttcgccgatctcctcgtcagacagcagctcgacgaaaggggccgaaggctcgcccgacgaatccccggcgccttccatccgctcgagcagagcggcctcatcggaaagaccctgctcaagatgagcggatccagccgcatcgccgggcgccgcctcatcggcccatgcgcccgaaacgggcaccatgagcccgaaagcgagcgtcgccgcaaggatgaatgatgcaaaagaacgtatgccgcgcatgaaagaccgtcccaccgctcgttcggacaatacagctgccggccaatgccggaggcggcaccattgtgccgtattacctattgtattgctccccgcgcgatcggggaagcatcattcggacagcggatgtatccggtagagccgcatatcgccctcgctcaacacgatctcgaacccaggcgtatcgtcgtcgatgcgatcgatgccgaaccaatcgttcgcctcgtatgaaaacaaaaagtggtttccgtcgtgcttgccgttctgatcgagctgcaacagatactccgcccctatcgcgcgaaccgcatccgccacgttcggatcgagtgcgaccacatcgaggctgcgtcgaatgaccttgctctcctcggattcggacggaccatcccatcccgatacgtagcgatagtacacgtttgcattgttggccccgtaagcaaacaccgatccgtcgttcggctcgttcaaaatcagggctccgggttccacggcgctcttcaccttctcgacaaacgcgatctcctcgatgccgtacatcttcggacccgaaaggctgtaggcgacgttcaaaaaattattcgacgaactgaaagccgacgtcggaccttgctgtcccggttgagtgtagcccggatagaagttcacgcccacgaacgccgcagcgacgatgcaggcgacggcgcatgaagccgccctgcgcgcacgcgatgtcccgaaagcctttttcaacccgcgcgcgatcgccgtcgcgaccacgtacaaaccggcgctcgccaagggcacggccacgatcgtcatattcgccatgagcctcatcgcatcggtataccaaaaacctgtgagcagctgtttgaccggaccgtcgaacgaagccgtcaccacgtaaagcacgcttgcaagcgcatacgaaaccgcaatccaccgatactcccgaaccgtcagagcgtacacgaaccccgtcgcaacgaaagcgccgagcacggcctgcgcaaccgtttcctgcgacgagagcagcaagacgtttgcaatcgcctggggcacgcttgcaaacgacggccaagaatacgccacgaccccgctcatgaacgatgcgttgaacaacgcgaaccaaagcgccgcaacgccaacgacgaacagaccgagaagaagcgcacagcgcaccgcccagcccgagccgcttcgttgggcgatgcgccggcagcagcagacgatcctatccacgcaaaagggaaccagcaagacgcccgccgagaataccgcgttgggctgcgtgaacgccagaccgaccaagccgactgcaaacaggcacgccgaggcgatgcgcaaacgcctatcgattccaagcgtaaagatcgtcacgaagcagaacaggatcgagggaagaagcgaaaacgccgcaagattcggaaacaaaggtccccaggcaagcagcttccaggggaacacgacgaaggcaagcgaaacaaaggctccgaaaaacaaaaccccctgcttcccgaagaacagccgcttcatgaacagatacagattgagcggaaacacaagcgcgcagaagaggaagttcgccgcgttggcgccgagcgccaccggtacgccgagcgcatccactatcagcgaagcgatgcaatgccacgccgagggatagaaggccgatcccgaaaacgggggctggaatgcggttacgttttcagggtaaagcgtgcttgtcagcgaagaccagatccccgaatcgatgaaggcgcgaaccgtgttgagatgatgcacgttatcgaactcctgaacgaacgaacacgcgtcgtcgaaagttccgatgaagatgcagcttgttacgattatgccgacagcggcgtacaagcacggaaaaagcgcctcgcgcaaacgatcgcgcgtcgaaacggcgtgcgatccggcaggatcggcgccgaagggaatctcccgaacgcgaacggccagccgaagaatcacaaacagcgcgacgccgaagccgagcagcgggaaaaccagcgtttcccacgaacacgacacgccgatcttctcgtatgcagcggcaagcaggctataggcgacgacggttacgagaggtgcgcagacagccgcgatgatgcgcgacagacgaaacgcccgcagcaccgcatacccgggggcgtacaaaaacaaaaagcccaccagagccgccaaaaagaatgtatcccacatacaacccctaccgccgcagctccctcagccacgccatcgatcacgcacaacgaagccctatactataccaaaaacctacgccggcgtatcagggtacgctactgatcggtgcccgcatcaaggaaaatcttgcgcgtcacgaagttccaaaccatcacgatggcggtcacgactatcttggatatgcggtagtccacgccgaacatgtccacgccgagccacagacacacgttgttgatggccaaaccgattaccgataaaacgacgaagatcgcgaactcgcggcggcggctgagcccctgcttgtgagcgaacacgtatcgcatcgaagccaggtagttgaagatcaccgaaaccgtaaacgaaatcgttgcgctgacgaggtagtcgatgccgaagacctcggtcaaaaatatcagcaagccatagtcgatgacaaatgcgatgaccccgaccacgccgaacttcataatctgcgcgataagccttttcatggtgccgagctgtccgatccttccgtccgtccgaaaagctcattcattttgtcataaacgctctggatatcaaggggtttgctgatatgggtattcattccacatgccaggctttcgcggacgtcctcggcaaacgcgttcgccgtcatcgcgaaaatcggcaccgtttcggcatcggggcggtccatggccctgatcgtccgggtcgcctcgtatccgtccatcaccggcatctgaacgtccatgagaacaaggtcgaaacggttcgtcgccgacgccgcgaaggactccaccgcttcacggccgtttctcgccgtttcgaccgcagctcccgtcatggacatgagctcggcggcgatttcgagattgagctcgttgtcttcgacgaccaatatggttttgcccgtaaaatcataccgcctctcgtcggcggcaaccgggctttccgcatcggcgggcgcagcatcgcttccccgcccggcatcgcgatcgtcgcgaacatgttcgagcgccgcgatgatcgaagattcgaacagcggctttcctatgacctcggtagcgcccacccgttcggcagccgcctcgacctccccaacgtcgtatgcggtgatcagcacaacggaagccttctcgccgccctcgatggcgcggatgcgccgtgcggtttcgatcccgtcgatgccgggcatcttccagtcgatgaagcacacgccgtacggctctccctgcctttgggcctcctcggccatggcgaccgcgcgctccccgcttgtcgacgagtcggattctatgccgagcttcccgagcatcatcgtcacatgctcgcacgtcacctcctcatcgtcgaccacgagcacgcgcacgtttccgaagctggctatcatcgcatcgggtgcatcggaaaggatgtagggaagctcgaccgaaaacgtgctcccaaccccgcactcgctttccacgcgaacattcccgcccatggtttcggccaggcgcttggtgatggccaggccgagacccgtaccgccgtacttgcgggaaacatcggcggtttcctgttcgaacgagcgaaacactttctcgaggttttcggacgcgatgccgcatcccgtatcgacaacctcgaagcgcatccacatcctctcgtcgcacttgtcgaccttcgttatgcgaagctgcacgcgcccgccctcgggcgtgaatttcagcgcattcgaaaggaggttgtagacgatctggttgatgcgcagcgaatcggcgacgatcacctcgtcgatctcgccgagcaggatcgtctcgtactcgatgccgcgctcgcgcgcctgcacgtggaaaacagccgtgatggactccacgagccttttgaaatcgaaccgctctcgcttgatctcaagtttgccgctttcgattttcgacatgtcgaggatatcgttgatgagcgacagcagatggttcgacgagagcgtgatcttctgcaggcattcgccgatcttcgatccatcgtcgaggtgatgggcggcgatatcggtcatgcctatgatgccgttgaggggggttcggatctcatgcgacatgcgggacagaaaatcgctcttcgccatattggcatgctgcgcctgcgagaaggccctctcggcgcggtctttttcggcgcgcagccgcttttcgttctccctcataagaatgtaagagaacagggcggtcacggccagcacggccagcacgcctatcgtcagcaacgcaacgttgcgcgtaagggtcgatccgagcgaactcacctgctcgtctatgacgttgtaaggaacggcggtgtacagaaaccaatcggttcccggtatgggagccagataaaggtactcgtgcatcccatcgaacacgagctgcgtgacgaacacggttttaccgtcgagcgcccggcgtatgtcgtcgagcgtgcgcccgtccccgagcaccgcatgctcgccgaaaagatcgaagatggtatcgtcttcgggtgcctggtatttcgcgggagaatagaggatgtaggtgccgtcctccgcaatgatgctcgcgtgcgagttgccgacattgcggcccaagacgagctcttcgccaagcaccgacgtatcgaacgatgcgatggcgcctatgagttcggtgccgttgaactccaccggctcgatggaatcggtgcagacgatgtcggatacatcgaagggaacatcggaggccgcgagcaccgaagggccgcctcccacaagttcgacgattcggcttcgatcgtaatcgacctcgaggtacccgtcggccgaaaagcatcttccctgattatccaccaggtaaaacgtttcgaatccgcagttttccttctgttcgacgatgtattctctcagcgacgcttcgtcgagatccatgcgggcaagcgatgaggcgatggtgtccatctggcttgtcctgctgctcattcccgcatcgaagtacgcgatcgtctgggagttcagctcctcgaggtacatgacgttgatctcttcgatggtctcgtcggttgcgccgttcgccgtaatcgtcgtgaacacgaggatgagggcgaacgccgccgccaaaaccacggcgactgccgcgaaccttcgcctgtcttcttgtctgatggtcttttccatgcacaaccccgatcgccggtcgggccgcacccacggccttagaaatcgaaatattgtaacatgcgacctatttcctgccagttctgattttgcggccgtttccatgccgaaacgcccgttgagaactcgcaagcaaagtgttttgtgtacaatggttccgataaaaccacattgaaaacccgccggggaagagaacggaagggaacggagagacgtgagagacaccgccgcagccgacgagcccagcatcgcggtcctgataccgtgctacaacgaggcggtcaccatcgccaaggtcgtcgacgacttcaggcgcgagctgcccgaggcgaccgtctacgtgtacgacaacaactcctccgacggcacggcggacatcgcgcgggcgcgcggggccgtcgtgaggcgcgagccgcgccagggcaagggcaacgtcgtgcgccagatgctgcgcgacgtggatgccgactactacgtcatggtcgacggcgacgacacctaccccgccgaggccgcccgcgagctgctcgcgcccctcgtcgccgacgaggccgacatggccgtcggcgaccggctctccaacggcacctacggcgaggagaacgaccgggccttccacggcttcggcaacgacctcgtgcgccgcctcatcaaggcgatctacggcttcgagttctccgacgtcatgaccggctaccgcgccttcaactacgcgttcgccaagacgatgcccgtgctctcccccgccttcgagatagagacggagctctccatccacgcggtcgacaagcgctggaggatcgcggaggtgcccgtggcctaccgcgaccggcccgagggctcggagagcaagctcgacaccttctccgacgggacgaaggtgctgctcaccatcgcctcgctgttcaaggactaccgcccgctcgcgctgttctcgtgggtggcgctcgccctgtgcgccctcgggctgttcttcggggtgcccgtgatcgtggagttcgcgcagacgggcctcgtgcccaagctgccctcggcgctgctcgccgtggccttcgtgttcgcggggctcctgagcttctcgtgcgggctcatcctcgacacggtggtcaagggcaaccgcaaggcctacgagctcgaggtgacgagggtctacgaggagaagaggcggcggaagggctagggcgcagccgatatgaagctcggaacagagtaacgaaaaccgtttttctcgttactgctacttccgcgcaaactcttcaagagaatttgcgcggcaagccttaggtcgaaaatacgtagggctgccctttcgaaagcctcgccaagaaagcatgagaacccatcacgagcatctattgcggcataccgtacatgcccgaagcagaagtgatgtccttcgcaatgcgggaacccatgctaacctgcgcattgtcagcaatagaaacaagctgtttgatcgtggcgttaagcccgatgtacgcacgggaccctatctgatcgtatcctcccaaaaccacacctgcagtcaaaagagcgttttcaccaatgcaaacatcatgccccacgtgaacatggtcatcgatttttgcataccttgctatagtggtgtctgtattcgaccccctgcacactgttgcaaagcttccgatttccacatcggcttctatgctaacgccgccaagacagggtacccttatttcgtttccctcatcatcttgcgccatggtaaatgcttgaccgccaatttgagcattttctttgatcaggcaatccgcacctattcgtgcatgcttcacaatggcatgggcaagtactatggagcgatctccgatacaaacatcatgcccgataagtgcgcctggttcgatatagacatcgtcgcctaaagatacgttttcgcctatgtaatagccttcagcggtaagcgtatagcagcgctttttcaaaaccgcaaactcatccgaagcaatttctcgaacatattttgcataggacgataccggactctcacagaaaacaaaattatgttttttacaaagcgactcggatggattcatgccattttccacaaataccaaacagcctgtcacttcttctagatttacaagcttctcttcaagttttttcccgacatacaaaaccgtatggctgagcgggctgccaatgaatgaggcctttgtaattcttccgtttttgccagatattgactcgacagccatatcaaacctttccctatgtcttttacttatacaaccatcgagccatcgatgccgataacttgtccggttatgtatgccgaagcatccgaagctagaaacacgcaaaggtcagcgacatctcgaggggttccaaaacggcccaaaccaatgcttgatgcgaattgctctgccttctcctcgctaatttggcgaaacaaatccgtgtcgatcactcctggagcgatggcgttaacgcgaacgttcgacggagcaagctccttggcagccgatttcgtaagagaaacaacagctccttttgtagctgaatacaccaactggtttttgttgccggcaacgcccatgatggatgccatattgatgatgctcccgcttttctgtctcgtcataagcttgcatgcatactgaatcagatttatgacagcatatacatttgtagcaaacgactcttccatcatggcctgggacaccatgccaatgggagcatcgcgcatgacgcccgcgttgttgacaaccacatcgagaccgccgcgctccttttttatccccataatgcagcgtttcaccgcatcggtatcagtcacgtcaaagtaaactgggtgcaaagaccctttcccttgctctgcgacctcatatgcccactcatcgagagatccctcttttcgggcatttgcataaacgaccgcgccttcttggcaaaaccgctcaacaataccgtggcctatccctctgccggaaccagttaccaaacaagttttctcatatagctgcataaatctacgcctatctcacgtcaataattctcgacatctcactgaccagatcgtacccatcccaaatcacatcaatatccatagccgaaccgacaggcactattcgatctattccaagaagcccagagcgcatgatttctttttttaggcgctcaggatctaggcctgcgtacacgagggtttgcgttctctcggtgattccaacagccaaatcgcaaagagaaatattgtcgatctgataaaagtatcctcctttgccgcgcgtttcctcaatagattcgggaacgctatcgaggtcgacaacgctaagcaagccatcgaattctgttttgccttttattgcgccatcgatgcagtcttcacatagctttacgtatttgtccataacgacggcaggctgcagcaaatattctctttcggcaattgctcgcacagcaccccagaaccgatttttagcagattgggttgcattaagccaaactatcaagtggggtgaagagcaagcattttgatccatcaaatatgtatcattgtaaaatcctgacgctatcttattcaattcatcagaagaggagtcttctatttcccctccgtcaaacatcgcgaaagaataccgatccgagaaaacgatatccttgctgcgaggtttgctcttgcacgcccgaacagattcgatagtttgatctccgccccatattacccttacatccacaatcgcactgagtttttcggttgcctcgctgttcgacgggtaggaaacgaatacagttctctttgcaatcgccgaatgggtatcgagcgtatcgcgtatagcatcgagaatgagccttacttgcggaaaaggcttcgacggaacacgtacgatgcttgcattccccgctaaaagggcaaaaacgtacgaaaaagcaaaatttaccgggacattggagggagcaatgtgcagtgctaatcccctacccattctcaagcaggtttttccctcgagaaaagccgcagctctttgatttacatttgccttcctgcaccaatagccgaaagaaataacatctggatattctcgtgcgctccgatcagtcaatatgcgttttgaaagatccgagaggaaggcgcacgcctcttcgctgtatacaggtagtggctctctctcgatacacgggtctccaaccaaaacctctatggttttgtcgacagcaagatcgaatgagctattttttctcatgggtatcgctgcaccccctgatttcggccccacggattcttccgtaaatcgaaaagtacgttccttttctcccacaggggcaatcgtcaacacccagtatttcaccctcgtcttccgtaagcaatatatgacccggatagctcgtaggaagaagggatacgcatccaaccacgccacgcccatcagtatggcccagcgtcaacggatccaaaacgaatacatccgaaaagatcgaagagtgcaaatgcccctcttcgcactccatgaaaatcgatccggtctgctcgaccattccatagtaattgtgaacgctcgttactcccgaggtttcggcaacaacctctttgaaccgttcattgcttacgctctcatccgccagtttcttccatcctccaccgtgaatcatgatgccgtctagaccgagattgatctcttttgcaagcaactgcatgcaaaagtattgccagatcatgaaagtaaacccgaacagcaacaccttctcgtcacgatgtctctctttgaatgcttggatttcgtcaatattcaaattcatattctcgtcaagcgcatatgtaacatctctgcccaaaacagaaaaaccaagtattcccgctccgcgggcggagaacatagctctattcttaacgaccgcactggaatcaataacgagcattggcattctctttgtgccggtaaaatccgatactatcttcgcaagagcctttgtctgccgagcggacgtatccctgtctagatagattttcgaaacgcgttgaccgcttgttcccgacgaggtcatggtcttaacgacctcggtcttatccacactcatcaagtcatattctttaaacagccgcacaggcagcggcaaattgtctcccaacattgccgttagccttgcatatttttcgcacgatttcttatggtgctgcgacaaagaggccagccacgtttcgtataacgccctcttttccgaggcgcaaagactaaatggatccacctcaaacaacggtccgtaatcaagcattcccgcattcctccaaattggcgtagagaactttacctgcgtcgttacgcggcagaccatcgatgcgcttaataacaaacgcccctttgtataggccaagcctgttcgacaagagagatcttatcgcaccgtcttcctgcttcgatggttcaacgtatatcaccatatgatcgtcttcaccggcgcaggcagccacgaatccttcctttgctagaaggctttcgacctcatcgagattgacccgatttccaaatatcttgaggaaacgcttctttcggccaactatgcgataaaacccatcttcgtcacgtatggccatatcacccgtttccaaacgcccccttcgttcgtccccaagcgaaaggtcctttcggctcgtagcgtagcccaatgatacattgcttcccgaatagacaagttcacctggaacataagaaccagcaacaacctcgccgaattcgtctatcagctcaacgttcccgccgggaatgggtaccccgatgtatccaattttttttgaggcatacttaggcggcaggtacataagccttgctgtcgcctccgtttgtccatacatgacaacaaaggcaatgcccttcttctcgcacacctgagcgaactctcgatggagatcttctcccaaacgaccccctgcttgagttataactttcagcgacggaagatccatacgatcaaaatgcagctttttgagcatttcgtatgtatatggaacccctccgaaggtggaagcaccgcaatcattcaacaatgcccagaatttgcgatcgaacaaagacctgtctgttagaacaagcgacgctcccgacaacaaatggctgttaacgattgaaagcccatacgaataagataaaggcaaggtggttattgctctatcggcatcgctgatatgaaggtattcagcaatggcgcgggcgttgctttctaggttttgatacgaaatccttacgtatttgcgactaccggtcgaccccgaagtagtaaggagtatcgccaaatccgggtagggcttctctccgttatcgtaaccggtttcgataagccgataggaacgaaacgataacgccacactgccatcgaaggcaaggtcaagattatgccaaatatactcgggcttatactcatcgaccagctcaagcaaagccctttccccgatagagggtgaaaccataagcggaattattccttgagatacaaaaccgacatatcccacaacgcattcgatagtattagtggcaatcaccaatactaccgaacgcgttttcatattctttgtgatctcaatacagctatcgtacagttccgagaacgacagctgcccgtcttcatcgagaagagcgcatttgtcgccatacctcgcacaaagatttgcaatcctagaattcgacgccatacttttccaggattcccttgccaataacgtacgagctgaaatcaataatatcatctgtatcgagcattacatcaaacgcatcttcaagagccgaggtgagctgcatgtgcccaaccgaatcccagttgcttaccgattgataaaccaaatcgtctcccagttgatccttttcaagctcgagcgtctcaataaaaatttgattatacagttcttcgtttgtcacaatagctccttcgccgcgtcttgcctatatagctttctcggttatctccaaacagagagccaaagctttcttgcccatctccccgctcgttgctaccggctctcccgtccgaatgcaatgggcaaaatgctggaactcagacctcaatggctcgcttgacgggacaaacacctgttcaataatgttttcctgcttgtattgaagatcgtatcccacatcaagcgtaaaattggtctttcgcgatatcctgacagatcgatttaaataatcgaccactataaatgcattacgagcgttgatctccgcacagcgaaccttagactctgtaaccctgctcgcggtcaaactcgcaagcaaaccgccctcgaattcaaccaaagcctgagcgtagtcaagtttatccgtatatacttttgcaccctgactcacaacacgttttacggaagcgtttgcaatagcatttaatacatctatgtcgtgaatcatcaagtcctgtatcacgcttgcatcggatacccggcgatcaaaggggctcatccttcgaaaatcaaccgaaataatttcttcatgctcaaggatttccagcaaagttgtaatcgcgggattaaaccgctcaacatgtccaacgcatagcctcacgcccgcctcgtcgcaagcatcaatgatatgctgagcggcttccaaggttagagcgatgggtttttcgacgagaacgtggcatccagcttgagcggcggcaacagcacagtcttcgtgcaaaaaagaaggcgttacgatatggacttcatctactgccgcaaaaagatcctcttggctctcgaaagattcaatcccataaaaatccacttgctgtttcgctgattctttattcacatcaaagcagccgacgagttcatattcgggcatggtcgagagcactcgtaagtggttgcgacccatgtttcctgtgcccagaactccaactttcagcgtttctttcatgaaaggctctccttaatagcaagaataactttgtccatatcctcttcgctcaaataaggatgcatgggaacgctgaatacccgcgaagctagattctcgcttacaggcaggctcacattcgtataccccaaatccctatatgccgtcgactggtgaataggaacaggataatacaccgccgaaggaatgcccctctccttcattccctcaagaatacgatctcgttcttcttcgtccttggccacaagggtgtattgagcccaagcagaaatgtccccttcaacctccaacggtgtacgaagaacatcggaaaggttctcagaataatatgctgcgacgcgtgcgcgctcaacgagctcgttttcaaatatctggagcttagccaacacgactgccgcttgaatggtatcgaaccggccgttaacgcctattctaacgttatcgtatttgtcggttccctgcccatgcacgcgtatagaggtaatgagggaagcgagctcgtcatcgtcggtgaaaatcgcaccgccgtctccgtagcaaccaagaggcttggctggaaagaaggaggttgccgcgacgtttccgaaagagcaagcacgtttgccggcgcgagccgctccgaaaccttggcacgcatcctctagcacaaacatattgtactttttcgcaatttcggcaattgcctcatagttagccaagcgcccaaaaagatcaacgggaatgatgcccctaggcgtcaactcgccctcagccacaattcgcgcgatctccttctctagatgatttggatcaatattgaaggactcttcctcaatgtctacaaatacaggagttcctcctgctagggttatgctttcagcggaagcaaaaaaagtgaatgaaggaacaaagacggcatccgtttttttcagaccataggccataagaggaataacgagtgcatctgtaccgctcgcacaggtaaaagcatattttgtgcctgcaaattcagcaagtttcccctcgagttcctttacttcgggccccataacatatttctgacttcgcaacacagcatctacgcgagtagttacgtccgcctcaattcgctcgaattgagttttcaaatcaataaactgcatggctcctccatactcgatctcttgacaagcaccatccgctcaccaacttaactaacagccgtcttttctccaagcaaatgattcactagcagcgagcaccgtgatttctcgggaaaaacaaaaaaatcgtcaactctctgcttatagacattatccataatacacccgtgttccacctgatcgatcatcatatccacagcactatccaaatcaaagaccactggcccaaatccatcggagcgataatcatagtatccagcagagtacgcttgcccatcataaaaggtatccctgtcgaattgaacataaattatcggtcgcttaaaaagcgcaaagtcgaacgaaacgcttgagtagtcggtaacgagcagagagcccttttcgaacgcatgggcgtacgacacgtcctcaaccaccctcacaaattcattttcgcgaaaatcgctcctttgttgacgcaaagcaggatgcaaaacaaaatccattgtgtagccgttgctttgcattgcaagcagaagcctttcatcgtcgatcagcttgttaataaacttgcagtattccgacgaggcaaaatcgggatgtttctctctggttcctttttcttggttgtatgggagcacaagattagtgcgccatgtaggcataaacaaaattaacttttctctacgatgactgaaatcaagataatcatgccgaggaaaaccagtaagcgcaaggttgcattcgctgtagccataggaaccctcgaggaatgcacgcgtttcccgaggcgatgccgtcactatgcaggctatattcttgttgaacctattgagccatgcagacagatcgtttaccgtaactccatgctgaaggaaaacgaaatcgaactcgtaaagatccttcatatattgttccgcatcgccaaatcttcgacacacattatcctcagcagcggatgatatgattttgtctgcgatgagaaacaggtaatcgtattccggtgaatcacggtcgatcactgaaccgattgcctccatctccacgaaatcaggagacatgccggataagacaaaatgcacatccacgccctctattgggttgctgcttagatacgtaaacaaagcacgcccgttgtcatccgctcgaagcacggaatcgcttattagccagactttgttcttagatcctttaccgtacttgcgagcaatcgctctttttcttaactctatctgctctcccgtcaggccgcccctcggaagactcgctataaaccgtgcttccagcctttcgtgctcagatctgtctacagacctttcctcaaccacaaacccctgatcatcatcacctcggtacaataagtacgacccctctatgcgatacgaacccgcagttgacagctttgcaaaccgacagaagcaaagaggccttccataccgacgaccgtctacctcgatttccatgtgaatttttgctataccatttttgatttggtgttcaaacgcaaaacaatgtcgttccagataaccgctgctaaaaaatgacctaccgcctttggcgtacgggcgagaaaacaaattcacatcggtttccttgccattaaccgaaatgaacagtttcaccctattgcgaggaaacaggttgtcgatatccccttctatttttatcattccgctgggcgacacgttcacgaactgaagaagaattcggctctgcgaacccatcgtaccgattcttaccgtctggcgaccgtcatgctgcaatctgtagtggagatccccgcccgatgctaccagtcgagcttgagccgccgtaaatggcaagccgtgtttttcgctcagaacatacagtttctggatctcgttaagatttctttgacgcgcaatcacctcatcctcgatatcatctaaaaagcccaaaagaagtcgatgatacctttcttcatcttgctttgacaaaaaccccgggttctggtttcttaccaaacgccactgtagatcgtacataatgcaatactgcacgtacgggataatctccccatataaatctcttgaaagtctgaatattgatttgtagcacttttcgggcgcgtcgaaataccacgaaagatctctcagtcctttatcgagcgcggaattagccgtttgccgctttctgtagcagtaagccccccgcgaagataccccataccgcccaaacgagagaactatctgcgtcagcagcataaagtcctccgaaactctcagctgagagtcaaagccgctagcgggtattgcacctcgcctaattatcgttccgccaatcgaaagctgtggaaaatcatacgtatcgaaaatatcaataacatctgttttggaaaacttgtaattaagcgcatgtccacccgttgccgcctcaaagaacaccatgcgaaacgatacgaaaggcacatttttatgagcaaaaagaaaccttgccgcctcctcgaaggcgccttcgctccacttgtcgtccgctcccatgaagttgacgaaggccccgcgggccagggcgaggccggcgttgcacgccgcgccgacgcccgcgttctcctgctcgacgtacacgacgttctccgggtagcgctctagatagcgcctgcatatggccccgctgtcgtccgggctcccatcgttcacgaggacgagctggatgttgtccctgaaaccgaccgtctgcccgacgatgctgtcgagggtctcttcgaggtacggctcgacgttgtagatgggcaccacgacggtaaacaggtagtcggagcccgtttcagagaggatgcgagagccccttctcttcaaaactcgacggtacgcccacgatgccaattttttaaagcccgctttaagcgctttcttcagcttgttcagcttgttcagcaatccaaaaccccatcactaatcggtggctggactattccgacaactcaatcgttttgacaacggtctcacaacacactccaggctgcatgaatccaaaatcatccactctatcttggtactgcttttccattatgcacccttgggctatctgatcgcatatcgcatcaaccagttcgtctttgctaaaacaaatttttccaaatccatttttttcataactaaaatggcctaaacgcctgccatgcaacgtaaagtattcatccgcatcaaaatgattgtataaaacaggccgctttaggagagcaaaatcacaggcgatgctcgaatagtccgtcacgagcaaggcgctcttgctaagaatttcggcgtaatcaaaagaatcgagaacggacacgacatcgtttgtgcagaaactacttttttgctgagcgatatcaggatgcaagcaaaacgctacgcgatatcctgccgaacgcaaaaatgcgagcaacctctcatctgagagcaaattgttgtagaatctgcaaaaatcagaatccgcaaatcgtgggtttgctctcctccccattctctcaatacccatgttctcaaaaggaagcaccagttctgttcgccaagtgggcataatcaatatgattttttccactttggaatcacgctgaagcaagtccgttcttggctgaccggttaacgctatctggtcagcttcgtacaaatactcttctttcgatatagacttgctttcaaacttagacgatgtcagaaaaacgtctaccctattcgtagtacgtttgagaattggcgagagatcatgaagtatcgtgccatgctgaagaaagaaaaaccgaaaatgctctaagtcgttcatatagctactagcaaccccgaaaggcctataaacaaactcctcttggcgagaggatgcaataacatccgcctgcaggtaaaacttcatgtatttgatagaatctcgatcaagcacatttccctttctcttaagctcggcatactgggaagatcgacctgacagagcaaaatatactttagcgtttttcggaggattttcctgcaggtactcgaacaacgctctaccgttatctcgagcgtcgaagagatggtccattatgatccatatttgttttttcttggccttgtgcgagcaggatatagctcgttttctcaatcgcttcaaacttctgctcataatatagctaggagcatctgagacgtatgctttctccaaagcgaaatgatctttcttgctcagatccgcttgttccatcgtaaagccagtaccatcctccaagcatttaaacaaatagcccttttcatagtggtatgacttaaccgttgataaaaaggcaaaccggcaaaacacaagaattgcgggccgcctaaccccgccaatctctatttcgaatgaaacatgctgatcatctaaagaaaaatcaatttcaaaactaggaaagcagaagtagtctttttcgcaaaacgagcttatccctcccgtatgcgtccaacgttttaaaggcacctctttggtaactccatttaccttcatgttgagcttgatctggtcaaagggaagaagacagtttacagtccccataatatgaaaatcatttatgtgcaattccgtccgatgaacaaatattttttctacttcgattgcgttcgccatccgggttatcggctgctgctcgaacgacaacgatcgatgcggaggcatgaaatataaaccatctccgatcaaacgcaaatttttttgtacatcagaaaacgacacgtcatgacgcagagctaacgcatacagcttatcgcaaagagaaaggttcctttgtcgagagattacgcgatctgaaatgcatttgagcaggcctgacatttgaactttataatcctccgcaagacctggatccaaatccgcaataaaagcatcgtagcccatcctccattggagatcgtacataacaacaaactgtatataaggtattacctcgccatacagctgcttcgaatagtcgaagagttttttatgacaaccagtaagggaatcgaaatgccaatcatatccacgagatccgtgatctgttgctgctgttgccgcaagcctttttcgataataataagacgaacgagataagaccccatagcatccacccgcaagaataacatcagaaaccaacttgaggtcttcggaaaacaacagagacccgttaaaagtgtccctcggaattgcttcgcgtcgaataattgccgatccaccttcaatttgaggacaatcaaaacgctttttaatgtcgatgagctgcgtaccatgatcgtatttgaaattcaaaatatgatttccagtggctgcctcaaaaaaaatcatcctaaacgatacgagcggtgcctgagggtaggcagcaaaaaactcggccgcctcctcgaaggcgccttcgctccacttgtcgtccgctcccatgaagttgacgaaggccccgcgggccagggcgaggccggcgttgcacgccgcgccgacgcccgcgttctcctgctcgacgtacacgacgttctccgggtagcgctctagatagcgcctgcatatggccccgctgtcgtccgggctcccatcgttcacgaggacgagctggatgttgtccctgaaaccgaccgtctgcccgacgatgctgtcgagggtctcttcgaggtacggctcgacgttgtagatgggcaccacgacggtaaacaggtagtcggagcccgtttcagagaggatgcgagagcgttgctcagccaagattccgtcatctctttttttcgtatgaccaaaaacgtgtcccctttttttcttgggcatgagctcgccatgcaatctctttgcatctccaaaaagcagcgatttcagcagcttcttcctagtaacgatacgcctctgtaccttacctgctattcccgagtacgggcttacagcgcaaagggtgctgcgccaagacggatcgttgcgaacgatgtaatcgtagtagacatcaaaagcttgaacgtcttcctcaagagccctttggcttaatctaagataggcaaatctattaaacaaggacttcgcgctacccatcagttccttttttacaccatctcctagctcaagactgtcgcatacatcaagcaagtgatccattgtagacggaaacgagctcgccctttgccccatcatgaagtcgacgtcggcctcttctgcgttttctcgtcgattatatatagagtggctaacggatacggttgaatgcgaattgagctggcattccttaaggaaagcaaatcctgaaaacgagccataatcctcactgaactgaattccgtttccgacaactaattcttttgaataaagcttgcccgtttcgctaaaccctgcattccgtaaaacccaaggggcatcttctacggaaactccggattgcagctttttcgcccctaccgtatacgaatgcttaccgttgtcgaaatagtaaaaatccctatacgcgctatatgcgaagtcgccgttattttgggtaatcgagtcatacaggatgctgagcccatcaaatctcagagagtcacaatcgttgagaaacagaaggtaggttcctttcgcaatggctatcgcctcatttagcatcgcagttttattttgtgattttccgacgatatatttaaatggctcggaaaccctttttctcatttcgctataaaacgccttggttcgttcgctcgctcccgcatctacgatcaatagttcataatcggtaaaagtctgctccaacaccgaatggaagcaactaatcgactcttcgttttttctctccagagctattattatcgaaacagcaggccttgactcgtctaacaattctctaacctttccatccctacaacatcgtaatgagccaaaccgcaggtgttctagtttgcctacctgccgcactacactacatcaagatagtcttttatgataccgctcttcttaacgcgaacaaggtacagcggcgcgtacttcgcctacttgccgaccttattcgaccaaaccaaaacagttggagtattattgttatcattggagcaatgcgctaccgtcctttcgttgtcattgctcgcacaagtgccgttgactcgtcttggattagaggtacccaataatgagcgccgactttccctgcgttagtgttatcgttcctgtgtacaacaatgaaaagcatatcggacaagcccttgaaagcctcgtaaaccaatccctgccgtctgaaaaatgcgaaataatcgcaatagacgatggctcaactgactcttctggtgcaatctgcgactcctatgccaaaacccatgctaacgttatcgtcgttcatcaagaaaacggcggcgttagccgagctcgcaacaatggccttgccctcgccaggggaaagtatatcgcattcttagacagcgatgacacgctcgaaccacagacacttgaatcggcggcgcatttcttcgaccagcattattccgaaaccgatgccgtcgtctatccaatggcgctgttcaacgacacgcgtacatggcctcatgttcgcgaagaagtgcttaccgagtcgggcatatacgatttatcaaaaatccagcatgctttcgcactcgccacaaatgtaaacgtaatggtaaagaacgacgctaacttaccgcgttttcaggaaaacctccttgttcatgaagatgaactcttcttcatgaacatcctgctccgtaagcttactgtaggattctctaaagccggatgctatcgatataggcaggaaggaggaagtgcaatatatacaaaaatgcatccgtattaccaatttgaaaacaacattgccttctgggaagagctctttaatagatatcccaacgccctaccactttatctgcaagcctcttatctcaacgaactcaattggaaactgaagaaagactatgttttcccttatcattatccaaaagaagaatttgacattgcgcgcaatagaatatcggctttgcttagccgaatagacaatgatcttatacttgtggcgccgcgctcagatgagtatttggtcgagtattttctatccctcaaaaagcaacggctatcatgcaggctttccgaaaacggagcggccctgttttcgggcaacgagttcatcttctgcagaaagcacgtcattgccgaaatctatcgcaccaaaggcgaaaagtcgcattggcatattgaaggcgtcctgaaatcttttatcttttcctttttcggaaaaccaacgctaacagcaacggtcgatggttcttcggtcaagatcaacgcaacgataaccccttcgtcaagaagccggcatcttgcgcatgccgtcacaaacacattttggaattttgagcttgatttaccgctcaaagaagatgccgatatttcacttgacctagtccttaatgatatctccattccgatttcgtttgtcttcagcaaccgttcatcgcttaacagcaaaaccggtctcttgtcttgcctctgcaacaaagcaattattacagcatttcccgaacatgcccgatttcatattcaagcaacaaccaccaaaagagatcaaaaaaagcttctgcggcaaaataattctcttgttttatcgaaaaacaagaaggcttaccttatgcgcaagctcatacagcttccaatggcaaacaaacgtcccatttggctatactatgataggaaaggcgttcgaagggacaatgcttactatcagtttctttttgattttgaaaaaaaggacggtgttgtccgatattacatcaccgataacccccgcgatgtaaacacaacgctgttcacaaaagaacagctccgatttgtaataccattctcatccaacaaacatcggtatctgcaccttaaagcgagcaaggttattgtttcttatatcgaacatgaaaattggcgtcccttttttcagaaagcactcgattccgtagccgacctcgttaactacgatctcgtataccttcaacacggaatcctccatgcgcatatgccatggaaatactctgccgatagactgctaatggacaaagaggttgtttcgacttgctacgagcatcgaatattacgcgatacgtacggattctctgagaaaaaacttattttgtctggcatgcctcgctttgatttcattgatcataatgcgccgcctaagaaaaaaatcttatttgcaccatcgtggcgaaagtatcttgttgacgaggttccaccgctgaccttcaagccaaagacgcaactttttgaacagtctagtttttggaacaagattcgtcttttttttgaaaatacttctctggagcagatgcttgctgaaaatgggtacgaattagacattaagctgcacccgatattcggtgtgtataaatcctattttgaattttccaatacgcgagttaatttggtcgatgacgtttccgaaagcgagtatcagatactcattaccgactattcttcatgggtttacgacttcgtttaccttaaaagagccatcatttacttcttccctgatacggaggagttctctgcaggcttaaacggatatagagagcttgacatgcctctcgaacaaggattcggccctattgccaagaaggaagaagagctcttggagtatcttggcgaagctatcggaaacaaaggacatccaacttcgcctttcgcttatcgaatggaccgctttttctatcattacgacaacaagcagcgatatcgactctacaatgcgttgtcccaatcgtaaatcgctacacgatatgtcgatgtctgtttgcttcgctgatagcgaaatcggcaattcgcctagctgagccgaactcgcacagatcaaacgtgcttccaatgaaggcatctaaatcatattggggataactagccggatcgcgcaataatacagacaagcaatcaatgaggccttctttcgatgtgaatgttatatttggcgcgatcgctagaggatctcggttgagaccaggggattttcggtatgcttctatgtcggggacatagaatagaaccttcttgcccatcaaagctgcctcgtacacaatactcgaatagtccgtcacaacgatgtcggcctccataagcttcgaagaagtcgactttggagcctcgctacccgaatccagcgggtggaacgcccagacgaacctacctggcaaattatcaatatcgtttgaatcctgcaaatcgcggaatgggtgcttcgaatcctttctttttctcaacgtcggagcaagtaacaccgtcgcagcgtctgatttgcggccttctcttttacggcggtgcgcttccctcagcagcacatcgtatgtggggcggcatagcggaagaaccctttcaagcggataggaaaaagcgcgggcaaacgcctcccggtcgcattcgcccgtacagaaaacccaactgtagttacgatggataccgaaagcttcagccgtttccgctgtatggccctccggagtgtcaagtgattggtatccaaaacatttgaaagacccgaatgcatgccatatttgaataattacaggagtagtcggatgctcacggtgcaagcaaggctctgcagcactgctctcttcacaagcaaaatcgataaggctaataacgggatcgtagcgatcaagaaaacagatccgacaacgtgcgagatggtatatctcgataacaatgtggccaacatacgacactgcagttttctttgaaagctttttagtgtggtagacgggattccatcctctgccaacaagctcttcgcctagcaaaagaaaatcctctgaaggactattggcttgtcgcgaaagaaacaaagcttcgtttcttctaggaaaaatcccaaagcacttatacagaacattaaacatcgttctcgaaaactgtacgaacatttttttcatcatcatccgataacggtccgatcatcgagaacagcttgaagaatacgatctgtagccccgccgtcgcatgcgctcatgaatctatttttgaaatcaatgacttcttgggcatcgaaaaggtcatcgatatgcgtaagataatttagaagctcttcgtttgtcgccactacgggtccaggcgttagatcttcgtaagagtagtaaaaacctctccaatcgatatagtcatctatatcgtaagcgaaaaaaaccattggtcgaacgaacaatgaatactcgaagacgagcgaagaataatcggatatgcaaacatctgatgctgcaagcaatgcttcgatagacagctcctctccgtccaccaagaacgcaaaatccgagcagtcatcgggtattcgaggaggatcgtttacataaggatgatgttttacgagcaaagcataatcattgccgagcgccttcttcagtgcctgaatatcaagactatccggaccttttgcattgataacccgccccctgaaagtaggcgcatagagtattatcttttttccggaagtaactagagagacctcatcgaccttcttacgcgcctcttttaaaaaatcaacgtcgaaaaaaatatccgtgcgacttacacccaacgagcgtacgatctcagggcggttttccagtaccatggcttcaacatacgcccaaatcacctcggggctgctcaccgatactaaggatagattgttgtaaaacggatgctttatcttctgctcctttgtacccccaaaccgcaaatcggccgtactcatgccaaacttcttaaacgcaccgcaagcatgccaaagctgtatcacttttgtttctttcttgagaggcagacagctgattacatccgaagcatcatcaagaaacacatagcgagccgttgctatttccctcacaagccgaatacagttcaagcaatatcgcggatatgaaacctgatactcccgtagaagaatcgtccgcttatcccacgaaccgtaactgtcgattcgctcaaacactagattaaaattatctgaaagagccgaccctcttccttgaacaaacaggattttatttagggcgatcgaatcccttttgcacgaatgccgatacacggcaggatacagccaatcgagcagtatcgcttttataaacatctttatatgctgctttactgtatccatcgtagctgcgccaatcttcttccaaggcgcctataaattccatagcaaaatagtttttcccattggcttttttatatctgcctcaaaggctgcagaaatatcagcgattgtattgattcgacaaatttgaccgaccaatgattcaagatagctgagcattgttggatgttcttggtatagctttacagtttcgatgaaatcctctcttccgctacgactgctaccgaagaaccgcaaacccttttcgagtatcatgcgagtatttacaggaacgggccgctcggaaacgcccagcaaggacactgttccttctggatcgattatatcgatgatttgatcgatcgccgccgcagaaccttctccgccgcagcactcaaaagcgtgatcgatatgcaaatcgggtgggatcttatgaacctgataggtctcttccacaaatgtaaaatcctccattttatatgagtttcgaccaaaaacgaccaaacgcgcttcagggtacaacaagcgcagcacaagagacactataaagcccatattcccatcgccccatatcccaataacgtcttttcgctcatgggagaacgattcgaatctcgtaatggcatgcacggctacactgaccaactcggtaaatgccgccactcgtttattaattgtcgcaggcaaagaaaccacccgttcgggcggtagcaccatatactcctgcataaacccatcgaatccgctaccgcaaaacttacttgtccttaaataattctcggcaataacgggatcggattcgctcgggtcgttaggaagcataacgacacactcgcccttctcgtatgtgcccgtatcatcccgcactaccaccccgataccctcatgtatcaaagccatgggcaatttcttcgataagacctcttcgcctcgtgtaccctgatagtatctctgatctgcattgcatatcgatagatgggttgggcgaactatcacgctttccggccttcgccccacttcgacttgaactggttcaaaacagcggggagccgtcaatctataaacgcaattgagcatggatcagttctccagcatcgctcgagcaaccctcatatcatgaggataggtgattttgaaattcgacacgtctccgctaacaagttcgacgctttcacctcgcagtgcatatgctttacaagcatccgtcagtatagacttctcatccttggacaaagagttaagtatgcccttcaactttttaatattaaaactctgcggagtttggccttgataaagattacgtctgtcgggtatgtccgaaatcgatgcggcatcctcactgacaacaatagtatccgttgcaggaataacggtatcgcaagctccggaccgcaatgcggcgtcgacattatcgctgatgatcctcatcgatacgaaaggccgaaccgcatcgtgggttacaagtatagagtcctctgtaagaatgcagtgattttccgcccattcgattgcgttaaggatagtatcggttcgcgttgctcccccaatggcaaagcaaatttcgtctttgtaatcagggcaatgtcgagaaacaagatcctttgtttgctgaagccaagtttcaggacaaaggacaattacttggtcgaataagcctgatgcgcaaaatttctctatcgtgtgtacgagaacaggtttatctccaagcatgtagtattgctttggcttatccggattgcccatgcgtacaccagatccaccagctaaaatagcggcaattatcatttgcgcccctttcgttcgcgtggcccttggtgaaaaaatgcaaaaatttcagctagccagtaacctcttcatagtatgctacggcatcatctatgggtccatcgaacactttggctccttcgttcaacacgatgcctctcgtgcagaactcctgagccgccgccgattcatgagtaacgaaaagcacggttacatcctcgttcgacataatttcgcgcattctctcgatgcatttcttcctgaattccctatcgccaacagacagcgcttcgtcaaccacaagaatatcaggatcgatagatgccgcaaacgcaaaaccaagacgtgccttcatgccacttgaatacgatttcatcggctgatcgatataaagaccaagttcggcaaaatcgattgccttatcctctatttccttgtactcctttttgctcatacctagcacttggctgcgaagattcaggttttctcgtccggtcaactgaccatcgaacccagcattcaactcgagcagcgcgctcacccgtccgttcacggtcaccgttcccgttgtcggatagctcacgcctgtcaccattttgagcgcagttgatttccccgctccgtttcgtccgatgagcgcgaccgcctcgcccttcttaatttcaaaggacagatcgttgttagcatgaacaatgccaacaagctctttgttgtttctgctaaaaagaccgaggaagcggcttcggtcgttcttatacagcttgtaggttttcgtaacgtgctcaaacttgactaccggctcatcgcttaccgcagtccgtggccccagcgattcaagcaaccgctcttcagcatcaaaggacatcggacacctcctcatgaaagtgacggtaaacgagtatcataacgatgagcgtcacaacaaacactgcgacgaagcaaccgaaaaacactgggtcctcccaaaaccaccttttctcgcacaatgcgtcgcgaaacgctgtaacgaaaaacgtgaccggattaaacaacatgacgtttgcagcccatccgaatcccgatgtctccagcacattcatattgaaaaggattcccgatagccagaacaacggctgactgagggccttcatgagctgaccaaagtctttgctgataccagacagctgcgaggtcaatatcgaaaacatatcccaaaacacaaacatgagcagcatgagaataggaacctgaataagatagatatcccacggcatgccataagccgcgtatatgacaaacaaaagaataaagagaacggcgttcacaatcaacgttgaaagagaatacaaggtggatattccgcttagagggaatttcaccttgttaaccaaataagaatagcgatgcaaaacatccgaaccggtactaaacatgtcggacatgtaaaaccaaggaataagacctgaaacaagccaaacgaaatacggatagctcgtatccgccgatcccgcgcgcagcccgatctctaatgcaaaccaaaacaccacgataaatacgatgggctttaccgctagccaagcccagcccaaaaccgcaccgcgggcctgtttcatcagctcgaatatcgcaaggtgaccgatctgctttcgccactgccagttgtctttcagtatggttgcaagagtactgaacaaaattcgccgtcctctaaatcaaagcacaattccaagcgctcaatatagcacaatcccgattcttcctatgacaacaccgcacataaacgaggttacgacacaggaaacgacggtaaggcaacaataccggatgggtcttcacctgcatcgaccgtctccatgaggcgggaccaggtttctttatcctcagggatcacccaaagccccgcttcgttgacagagcccgtatgcggtcctgtgcacgagtaaatcgttacctcgtctttatgcagaagaaaatcggcggcaatcgaagcaagcagcccgtagtccatatcggttgtcgtatgctcttcgagatagataagggcctcatcgattttggccggatcattgagcactttttcgataagcgatacttcgatgtttcgaacgttgatttggcgcagcgcatcttggtcctcgacgtactctttgcgagcgcgggcaagtacgagggcttgggaaccgttaagcagttgcgattcgcctggcttaaccgttacgtctctccccgtcgaaggatcgtcggtcgttatcttcaacggaacgtccacgaccgttccccccagatcgtccaccaaagattcgaacgaagtgaacgttgtcatcatgtagtagtcaactgtggcccccgtcagcctttcgaccactttgactacttcctccggatctcctcctgctagcgcatcgttgattttcccacccgtccccgcaagctgggtatcccgaggcaccgtaacaagcgtaatggtgtacgtttcagggtcgacgcgcaccaaagtcatgatatccgaatgctgatcggtttgggcgtgctcgttcgctttccccgtataaagggccgttccctttcgagagtcggatccgatgagcaaaacatacaggggctccgttgccggttcgatgttcgcgccgatctcgccaggagcacccttggtgctatcgacatgcaaaaggctcgccacgccgatgaacgctgcggcaaacaccgcaacgacgcaaacgactgctgcagccatttttcgcgagcgtactattgcttcaggcgtatttcccattcccctagtataccatcaggcaatacgaagaagagcagtctgtgttaaggggcttatttactatggcgaggagtacgcgggccgtgctttcccttgttgtcgtagtagtgccgcaagactggtttgaacagcccaaacttccaaatgataaagaacatgactacggccaagccgaaaaatatcgcccaccggacagggccggaaaagcttcccagcatagtccccacaaacgcgaggaacgccgaacacagccatagaaccgcgacagccctgcgctgtcccaagccggcacggagcaaccgatggtgtatgtgccccatatccgcttgcccgacaggcttatgacctctgctacgccgaattatggcagagatcgtatcgagcaggggaactcccgcgatcaccaagggcacgagcatgaccacgaagctctgcgtgcggactacacccgaaatggaaatgatgcccaccatcaggccgaggagcaaagcccccgaatcccccatgaaaatcgaagctggaaagaaattgaaccgcaaaaacgccaagcacacggcgatgagcgcaacgcaggccaatgcgagcgtcgcgctacctcgcattatcaccagatacaaaaggcttgccgacacgatggcgatgatgcccgttgccaagccatccaacccatcgataagattcgtgatgttgacgaacaccaccaggtagagaaccgtcaaagggtagttgagccacccaagatcgacgtaatcgccatcgacgatcgaccgaaccgttcctatcgtaatgcccgcagccgcaaccacaacggcagcgacgatctgcccgaaaagcttcggcaaagccgccatctgaacgatgtcgtcgacaaggcccacggcgaacatgatggtgatgccgatgaacagcacaatgtaattgatgtcctgaaggacgtaaagatcgacgatttcccacccgaagaaccgctccgcgatgagcacggacaaacatgcagctacaagcccgacatacagggcaatgcccccgcatcgaggcacggggtcggtgttgagccgtcgattgctggggtagtcgatcgccccgatgagaacggcaattttcttagacgcaggcaccataagataagtgacgataaacgccacgaaaaacaccgttaatgcctgatgtatcgccaacaagtcaaatccccatgtacgtatttgtgtggctcatattagcagatatcgaacgctaaacgtgctcataaggcattttgacctgtatctttgttggcaaacgggcggtttagccgcagcggctgcacgccgcgaccagccgcacgaagcgcatcgctccttgcgcgaacaagcctatttccgctcttcgcgataccccttcgagctgcgaaggccatcgcgtatgcgccgcggcacgccgagcagcgcatccccaatccggtaggtcttcgaagcgcgcaggtcttcgtcgagatcgttgagggcggcagccggatatacggcttcggaataaaagatcaacctgtcctgagccgacatgctcccaagaaaccgcgctcgatcctccttctcgatatcctcaagccaaatgcgccccgccacaagcgagtaatccaccatgcggcgcgcaacggcacggaggaatccgtcatcgacctcgtccgcatgggcatttacccacttgcgcatttctcgcacgcagataaggtggccgcgcacgttttcgatcgtatgctttgccgtcatggtggagccggcgcgcacgcgtcgcctgtatagcggttcgttcaggtaggaggtcctctgcgaatgcacgagcgtttggaatgtaaacagaacatcctcgtggatgatgccttcgtagaagcggatatggttgtcttctatcagggagcgtttcaccatgcgcagagcagcgtgcggcaagaactcccgatgttcctcgaagaacgtaaacagcctcatgcccgtggtcacatcttcgaaagcaggccggttgttgtattcttcgcgaacctgttcgaacagctctttcgactcgtaaaaagcctgcgcggaaaaatacaggtcgtcgagctgctgcctgtcggcccggacgatcatcttttcaagagcgtcgccgacaaagtagtcgtcggcgtcgagcaatacgatgtagtcaccgcgcgcgttgtcgagagcaacgttgcgcgccgcactctgaccgctgttcttctcaagctcgaaaaagcgaaaccggccgtcgccttgcaccagctccttcgccgtatcaagtgatccgtcggtagagcagtcgtcgacgcagagcacttcgaagttctcaaacgtctgacccctgagcgattcgatgcattcctccagatacggagcgcaattgtacatgggaacgataacggaaatgcgaagatcccccatagatacccctaaaacgtttctgcattgcgcgccgcgaacgcggcagcgccctggtcgagcaaactcatgacggcttgccaatcccgatcggaaaagcaattccgaacaagctcccccgcttctcgggcacacgcgtattcttcgtgcatcctcgccgcgaattcttcatgaaacgatggatcgatgcgctcgtaattccagcggtacttgccccatttgtccgcgtggaaccacgggatgaagcgctcgcaccgttcggggcgctctcttagaaagcgttcgctttcggcaagctcatcgcacacaacgtaaattcgatccgaagtcttcaccgaagaagacggattatccatcctgtaatgtaaaagcggcttgcgaacgagcgcacatcgccgtgccgcaaaccaagccttgagcacgaacgaagtgtcctggaaggcggcgcccggcgtttcacgaaacgagatgctttcgcgccgcagcatgtccgagcggtacagccccgtccaaatcgagggtatcgtacagatgatgttcggatggtcagcaggatcgaacggtgtcttcgcagggaattctcgcagattgcggtttttcctgttgcgcccgtcggcgtattcgtagaagttcgatttcaccaggtcgcaatcatggcgctcggccaactcgtacatcgtggcgtacatggtgcgctccgcgaaatcatcgggttcggcaattgcaatgtattcgccgcgcgcctcccctatccccctgttgagcgatgcgccgtatcccgaattctccttgtcgatgatcgcgatgcgggaatcccggtccgcatagctgcgcagtattgcgggcgacccgtcggttgctccgtcgttaatgcagatgatctcgatgttttccaacgtctgcccgcagagggagtcgaggcattgcgccagatagcgctcaacgttgtaggtcggcacaagaacggaaactgcgggacgcgcctctgagttgttcgccattcgatttgcctccgtccgtacagcgccattttctgcccgtgcatctccacagcaagcgggcaagcaacattatacctgagcgtatcgaagcaggcggataacccttatactgacaagaatggggaaagggaacgaacataagcggcagattccaatcgaccagacaaccgaaagggcatgcggggtcgggctcggcctgaccatcgctgcaacgataacgctcttctaccgttcggcgccgctcgccctcacgatgggccttcaatcggtcaagcccctcgtcatcggtatcggcgtcggcgtgcttgccgccggcatagcattttcgctctattgcctgagagactccttctcgccggagcgccgcacaacaacatcgcggcttatgtggctcggagcgatctgcatggcgcttggggctctcgcattcgcaactcatacggatatccgcataacgataggatcgatgcccctcgattgttccgggatagcgatcggcgtggggatgacgttcgcgttcttcgcttggcaacgccgattcacaaccctcaccgaatcttcctttttcccagcgacggtctacgccttagcggccgccggattggcctgcggcatcatcgcagcagcacccttcgccgtcggcatcggagcttcgtgcgtcgcaatgctcggaggcgcgcttctctgcgtgacgcaaaaccctaacgttcccgcatcgggagccgacgccgtgaaagaaaacaaggccgattccgaaacgacgacaaaacctgccgtctcagcaggcgggcgggaaaaggcagaggcccccgcagcgcggcggatgcgacggcttgttacgctcgcatggaagccccttctcggaaccgccatctgcgcattcgtcatcggcttcacgtgggacaccgacctcatcggcgttcccctgaacaacaccaccatgctcgcaagcgaaaaagtcatcggcttcctcatcgccgccatccttctgttcgctttgtcccgcacacagccgcacgatcgaatcgaatccgtacttctttatacgatcctcccccttgcgctgttttccttcatcgttcgcccttacttccttggaagcgatctgccgacagcggttctcatggtcatcggcgttgcccgagagctcggattcgtgctgttcttcaccgcatcctggctcgagctctgcacggcgcctcgaaaagcagaagcgagtacgggacttctgttcggcatcgcctgcgtgatgtgcggcggcgtgctcttgctcgggttcggcggcacctacatcttcggtccggctatcaacatgatgggagccattctcttcatcgtctacctgatcgcgatcgttgcctcctcgacaatcgacgctcgcagcaacagcaaaccgctctcggcgcaagatgttgagggcttcctcgaaacgcgggccgaggcaatcggtgacgaatacaacctcaccccgcgcgaacgtgaaatcgtcttgcatctcagccgcgggcacagctacgcgtccattgccgagcgtttgtttatatccgaaaacacgctgcgaacgcatgcgcgcaacatctatcgcaaaatgggcgtcagctctcgagagggactcatcaaccttatccatcctgacgtaaaataggctgcttttcctcatttccgcaattccgttgagagcccaacaacccgaatactacttttcggttatagcctctggacaggcctgaaagcacaatgtttcccgcaacgcatcgaaggatgctgcgggaaagctcgctatcgaaacccaaagttccaccgaaacccgccgcttctcagatgcttgaaacgccgacaataaggaggaaacatgggatatcaaattaatcggcgcaactttctcaaaggagccgcactgctgggaggaggagctctcatggcaacgggtctctccggatgcggtcaacccaaaagcgccgccgaagcggcggcggaagctgctggagactggggaacatttgacgcgaacgggatttacacgccctcgtttctcattccccccgatccgatagacgacagcatagtccaagaggagttcgaagccgacgttgtcgtcgtcggcatgggtctcgcaggcatctgcgcggcgcgcgccgcactcgaagaaggcgcgagcgttttctgccttgagaaaggaaacgagtatcatctgcactcgcaccaaatcaccgctatcaattccaagatcgcgaaggagcagggcgtcgaattttccgatgaagatatggataaaattttgcagcgcgccctgcgcgacggccgccagcgcggcaactacaacttgtggaaatacatgatcgagcactgtggcgaagatttcgactggtatctagaaaagtgtcccaactacactgtcataaacgcaacggaaaccgccgcagaaaccgaacttgattacgaggcgatcctcaacatctgcaccgacggccttgccgcgaaggccgggcgccacttcgatgacgtaacccccgaacgcgaagaagcggcgaaggcgggagcgccctatatcaacttgttcaaccatccgacaaacccggaatggagcgtcgatgacgaactctatccgatgttcgcatcggtcatcacggttgagcccaaccattcatacgtcggcaagtattcggttgaatacatcgagcaaaacgccactgtcaagtacgctgtatgggcaaaacagctcatcaccgatagtgaaggtcgcgtaaccggcgtctatttctgcgacaaagacgataactactacaaggtcaccgccaataaaggagtcatcctcgcaaccggcaatttctcaagcaatccccagatgatcgattactacgtccgctcggcagcggaacttgatccgacaggatggcccgaagtggacgcaaaaagcaacccgaccaacgtcggcgacggcatcagccttgcagcatgggcgggcgccgcgatcgaccgcaacgacacgatgacctacgtttgcgactcttacggcggcgcaatggggtgcaatcccttccttttggtagatgggctcggcaatcggttctttaacgaagatgcaactggcgaaatatacggcgcgaagtccatgcgcgttgcaggaaaggtgatgtggcagatcttcgatgacgatttcccggaccaagtttcccatatgcccgtcggccatcgctgttattggaaaatcaccgaaaactacgacgacatcccactcggtcttcttttcgacccgattggcatcatgacccgttcggaagtcgaaaacatgagtcaattcaagtgcgacacccttgaagagcttgctgaaaacatgggtgttccgtacgagaatctcaaggccaccatcgatcggtacaacgaactctatgacaagggcgttgacgaagatttcggaaaacgcgccgatcgtatggcacctgtaaggaaagcacccttctatgcaaccgccatcacgcctcccaaattccgcaacaccgtcggcggagtcatgagcgatgaaaacgtgcatgcactcgatgagaacaatatgccgatctctggtctatatctcgcaggttctatggtgggaaaccgcttccacggagcgtacacgaacacaaacatgggtcagaatcatgcgggctgcatcgtctacggccgtctcgcagggaaaaacgcagcgcagggcgcataaacgtaatgatcgccgcccacaaaacagggcgaaccgcccgaatcggtaggcggatagcccgacctggaaacacgaacgaatgtttcacgtgaaacattcgcttctcggacgacgaaaacggacgcctgaccccagacgtccgttttccattggcagagccatcgcgtgcggttcgcaaagcgcgatggcgcatgctctgcggtttactcgctctgcgcggccatctgaccggcaaggcgtccattcaccaggcagtcggcggttgcgcacgaacccaaacggcacgcaccgtgaacgccgccggtcgcttcgcctgcggcgaagaagccggggatgggattgagatccacatcgagaacctgcgcgtccatgttcgtcttcacgccgcccatcgtgtggtgcaccttcggccaaatgcgggtgatgtagtaaggaccgtcgccgaggggtttcgcatcctcggggatcatcttgccgaactcttcgtcgttgcgattttcgacgtaggtgttgtagcgttcgagctgagcgcggaattcgtcggggaggctgtactcggcgataacgtcttcgatcgtgtcgaatttcttcgtgattccggcatcgatcgcaggctgcaagttggcttcgtagttccacttggggatattctgctcatcgacgatctggagcagcggcacgccgttttccacgatcgcgttcgagtacacgcggcggtcggcgagctcgctgacgatgcgcttgcccgtctgagggtcgatgctcatgccgtaggcaacgttggcgtcgatgtagctcgggcctttgccgtatccggtctcatcggggctgcaccacggaccaagctggatccagtcgagatgcacggccaaagcgccggctttcatggcagctgcaagagcttccgccgtcgcaccgtcctgattggtgcaatcgacggtttcgtcgagatgcggatcatgctgcgcacgccaggcgacatccttgccgaacccgccgcttgcaagcacgacgcccttgttcgctttgatgtagacggggtttcccgtcatgggatcgttgcccttcgccttctcgttcacctgcacgccaaccatgcgcccggtttcgtcgcggaagaacttcgtcaccatacggcccgtcccgatcggcacgcccatctcggtgaccttctcggtcagcggcaccgtgatcgcggatccgtggccgatggccgggtggatggtgcgcacggtgttgtggccgccgtaggggatcacgttgatgttgccgtcttcgtcggtatcccattcaacgccgagctcgctttgggtccactcccacgtctcgttcgatttctcagcgaggacacggcacttctcttcgtcgttcaagccgagacctgcggtcatcatatcagcgacgtatttatcgacggaatcctcgatgcccttcgccttctgcgccgaagacatgcatacggcgaagtcgccgtcggcgatggccgaattaccacccgtggtcggcatcttttcgacgatcatcgtattggcgccagccttcgaggcctcgtacgccgcagccagtcccgcatagcccgagccgataaccagtacatcgcattcttcatcccatttttcgggaagccccgtgcccgaaacggttgccgcagtcgccgtgcctttttgctgaggcgcgcatcccgcaaggcccgctccggctacaaccgcagccgccgaaccaacagccagggtcttgaggaatccccttctgtccaacgatgtctccatgatccttctcccttcgaatccgtcccctgattaccaagtatcgacgcatcttcagcacgcccggcgcgccgtttgcgcattccgttgaggacggatcgatcataggagcgagaagggcgcgccgtgtacctccaaagggactattctcggattttcgcttgtggcacaaaagggagtatattcgagtttccgcagatcaaagcattgatttaaaactaggcgggaggcagctgccccttccataccaaatcgagcagctcttggcgcgaatgaattcccagtttcgcatagcatcgacgcaagtgggttttgaccgtgtaattggaaaggaagagctcttcggcgatatagacggcgctgcggccgctggcatacatcatcaggatctcgctctcgcgctcggtaagacccgcgccttcgatcgcttcggtgaacttgcgctcgtagagccccttctcatccacgtcttcttccgtttccgtctgaacggttggttgcgcagaggcaaccgcggtgctcgaagaagcatcgagggcgcctgcggcgttgccgaatccgagcgcggcgccggcaacgccgaacagactctcgtcttcgcccggctcgaacggcgtggtttcggcgttctgccgcttgagaatgacgactaccgttacgagcactccgatgaacaaggcccacaaacccacaatggataccaaattcgcagttgcttccgaaatcccgacgacgttggacaaaacctcgaccgaaccgcgaccgagcagaaggcccaagcgcatcgaaccgagtccgatggcgaacagcacgagcgaattcgccttgctctcatagcccttccatgcgaacacgacccacacgagctgtccgaagaaattgaacagcgcaagcggcaggccattggtgaaaaacgactggctttcaagtacggcgcgcgccatgagaaccgtcgcaagggcaagcggaacgaggattaaaacgcggaactgcacgcgcatcccatcgcgaaccacatagagcagaagcgcaaccgaaaccgcgatcgttgcgatttgagcctcgggggaaacgatgtagcccgaagcgccctgcacgacatccatctccatgatgctgccgaagatgaacgagaacgcgatggttcccagtacgatctccttcacccccatgagcagatggccgaagctttcctggctcccgtcgggttcgtagcgcttctgcttcgtgccgaaatcaagacgcgcgaggcagaatccgaggattacgagcgaggcaaggggaaacagcactcgcaagccgctgagccctaccgaatcgccgacgttgagggaaaagagaagggagcacaaactccagataacgtacgatccgatgaccagaatcaccgaaatcgacggcttgaacgaagcgaagctcactccccagcacaagttgagcagcgcgagggcgccgtacaccccgatctgcagcggggcaaccagatcggcaggcacatcgaaggcgaacagcaccgtgcacagaacaacaacgagggcaaagcacactgcatacaggtatttgctcgtgtagacgcgcaaccgataggctacgtatcctcccagaagatacgtgagcgtttcggccaacagcagcggaaacggagtcatcccgaacccgaggaagttcggcgagggaatctggagaacgacaaacaagccatcgccgatgataaccgcccatagcagccattgaggatatgacgaatccttcagcacacgccctcccttgggcttctcgtctttcggagttgcgcagcattcgttcacagcgttaaaagcatcagtatactcgtttccgctgtttggtgttttatcagcaaaacgggcgccgcgcaagatggcggcaaacgaaacccgctactccgaatccagcagcgccctcagctcttttttgctgttaatgccgatcttttcgtaaatatggcgcgtatgcgccttaaacgttccttcagcgatgaacagctcctgctcgatggccgcactcgttttcccttgagcgatcagccgaagaatctcgtcctcccggggactcaaccggtagtgcgccgtcaaatcgtcacagcgtttttcgagacgttcctcttcagtgcttctctcgacgagcgtgccggaatccaaaatcgtcaccccccatttcgacgaaagctcgcgctcggagaagaggatgaacgtcgaggcgagaatcaacaccgccacggttacggtaacgagcatatcctgggttgccgcagacaacggtgaagaagcgagcaaagcggaggcgtctttcccccacacgatgaatatctgctcggcgctctttatactcgcaagagccacgatggcgattccgagtctcttcgaaatatcgtacagcaagagggaaacgagcacggtcatgagagagtagctcatcgatatgaggtaactcgacaccgacgaaccgagcacgctctccgcaggaaccaacacgaatccgcacaccatgagcaaaagcggcgatcgatacaccatgccgacattgaagcgaccggagaagaagtataccccggcaaacagaatccccatcgctatggcggtagacgccgacgagtgcatgcccgccccatccgcaagctgcgatgcacgcaacccgtaggcaaacgaatacagggcaaacaggatgaagagcttccacgggtaggaaaaacggggatacgcctgcggaggtttttcgcaacgcgccgctttcctcgcagcgtacctgacgcttgcaatcgctgcaaggggcagcaggatcagcgcgatgtccattctcaaagcatcgaaaccctggcagaagaaaacgaatacgaccgccgcaagctgcgacgccgtcgtataaaggaagatgcgaagcaaactgagcgccccaagcgcttcagcccatatgagcagaaacatgctgaagcccagtcctccggccaatgcacccaaaaccgccggcacgacggagatatcggaaacatacgatgcggcgacgctgcacaccgacgcgacgagcatgccgccgagtgcgagcacttgcgaccaggggcgcgcagacaggggaatgatctttcttgccccaacggcaacggccactgcaagaatgcagtatgcgtagtcaaagagaacatgcgggtcgaaagcggttgcaagaggcgtcgacggagctgcaaacatcagcgtgacccacgctcgcgcgcacccgagggcgaagagatacggcactattccgtcgagctgggcgatgcgcgctgcgcgcttttcttttgcatgaggttgcatggcgctcattataaagcgaaacggctccgtatcgaagccgtttcgctaaagcgcatcgcatatgagggaggggtgtgcgatgccggaatagttcttggcagagccggtgggttacaggcttgcgacgagctttcccgtcacgtagcccgacgtgatggcacgtccgatcgacaggccctcgatatccatcgggtaatcgacgccgccgtagaactgcccggacgcattgccgacggcgtacagcccttcgatcggattgaactcgccatcgaggcactggctttcggcgttgaccaccaaaccgccgaggatagcaggaagcttgttggagccgcgcggcactgcgtaatacgggccgccctctatggggacaagatactttgccgatttgccgaaatcttcgtcgcgaccggctgcgcacagttcgttgtagcggttcacttcctccgcaacggttttcgcatcgagcggatctatgtcccattggttttcaacggcgtatgcgttcatcgcctcgacaagctcttcgatggtttcgccctgtatccatttttcgggattcaccttgtttgctccgttgtagatggatacgtcgtacggagcttcggccttccaatcctcgtagtacgtttcccaatcgcttggcacaagactgaagaacttcgccgccgtcgaatcctgaaaacccttttcggcaagatagggccgcgcgaagttgttcatgtagcccatgcggcagcaggtctcgtccatgaaacgacgtccatggttgtcgatgaagaggaagggcatttccagccggacggcagcgggttctccgtggatcatcttcgtatgcgtgggcggcgtcatgatggcacccgcccacatgcctgcgcagagcgcgcttccgtcgcggaaggtcgtgaagagggagaatcctttcgtatcgggcgcatagtaatcgagcatctcctggttgctcgaataatccccgcatgcgaggatgacgcccttggttgccttgaagagcacgtgttcttcggcttcgttcgaacagatgacgcctttaacggcaccatcctctttgtagagctgcacggccggggtgttgtagaagaactcggcacctgccgcagcaagcctctcggctatcgcaagggctgctgcgttatggttgccctccacgtgaaaatacgtgttggcatgcaggtgaatgtcgtacccgttgtaggtaagcaccgaatcgtggggtttcgattcgacaccgccctgggcggcctcttcagcccaccatccaatcgcctcctgggaattatgagcccacacgtttaccagatcgcgattcgatcggtagtcgcttttccagttgataaagctcacgcacgcctgaacggcggcttcgtcggtctgtgacaaatcgatggaagccgccatgttgccggtcgtctgcgcggtgccgatgttctgcacgcatgcaaccgaagcgcccgcctcgagtgccgtgtgcacagcggaaagacccgattcccccgctccgacgacaatcacatcgaattccttggtctcggcgaaatcggttatcggctcgggcgcttgcagaaacgaaggcccgccggttgcggcagcctcgcttgcagaggccttggggttttggttgggctgtccgcatcctgcaagggtccccgctccaagcgctcccaatgcagctactccccccaacttgatgaggcttcgacgcgtgacgttcatatgctctcccatgatttcccttcctatccgtatagattctcggaggccacccggatcggcggcgccctttcggatatccactatgaaacggcggagcccgttgcgcatcgaccggaagcaaatttgaagtttacttttataaaccagactataaacctgccctgcgaactggtattatcgccatcaagcacagaaagcgcaccgcttgccgcatggatgaagaaccggtatgcagcctggcgttgcacgtgaaacaatgcactcgggagcacgagcagtgccgaggggatcgcatcggaggtcgtcgttgcaacagaaacaggcaaaccatgtagtgcgcggaatcgtctgcgcggcggctggcggtatctgctggggattttcgggtacctgcgcccaattgctcacttcgggtttagatattcccgtttcgtggataacctgcgtccgcctgcttgcagcggctgcgatcttcttggccatctgcatcatcaaagacaggcgaaacctgctcgcagtgtttcgggatcgcgaatcgctcgtccagatcgcggggttcgcgttgctgggcgtattgttgacgcagatgagctacctcacaaccatttcgtataccaatgccggcaccggcacggtgctcgagcggcttgggcttctcgtcatcatggcttatgtgtgtattcgcgtgcgccgccttccgaagcttcgggaattcatcgggcttgtgctcgccatcggcggcacgttcctcattgcaaccaaggggcacttcgattcgctcgccattccgcccgaagctcttttctggggaggcatgtcggcgatagcgttggctttctacactttgctgcccgtcaaagtcctcaaaaaatgggggagtctgatcgttaccggccttgccatgctgataggcggagtcgtcgccaccgcgttcgtgcgaccatggacgattcccgtcgccgttgacggagaggtcctgctcgttttggggctcatgaccgcaatcggcacggtagccgcctacatactctacttgcagggcatcaccgacgcaggtcccgttcgagcagggttggtaggatgcgtcgagccggtgtcggccacgctcatatccgccgtgtggctgcatacgcccgtagcgcccgtcgatatcgtcggagtcgtcatgatcatcgccatggtattcctcgtgaccgaccgcggcgacgatgccgaagggaaggaagaagaatacggcggggcgcgcggagacgttcccctcttcgaaggacgcgcttcgatgctcggctattattctgcacggaaggcagtgcatgccgactatcggcgcatcatgaccctgctcgacgaagggcaccgctccctcaaggaaatcggcgttgtcgaaggattcaagaagtatccctcggcaaggcgcgtcatgagaagcatcgacgaggggagctgctatgtcgtggccgatgacgagaacatcatcgggatgttcgcgatcgagatgaacggagacccccactacaagcttgccctcgacggtcaatggctcgtcgaaggagtcgggggcgaacccgtctacgcggcgcttcattgggtcaacgtcgcacccgaagcacgggaatgcggtgtgggttcgttcatccttggaagtgccgagcgcatcgcacgggaaacgggcaaggaaagcatctgcgccgatatctacccgggaaacgagcccatgcgcaacatgctgctcaaacacggctacctcgaatgcggatcgatccgcatcaaagactatctcgaacgtgagaagcagcgggcggttttcgagaaaatcctgtagcgcgacacgggggcggggcatcgcagcactgcaggatttcgaacaaggtgcagaagcaatcgcgcaacgcttcgcaaacaagatttggcgcgccggatctcccaggaaaagaggctggtgacaaaaaagcggcggcccgaaggtcgccgctttggatgctatgttcttatcgtgtcagatcgaacagagctatgcgcgaatcaatgctatttggcagcgccgatacggcagatggtggtgccgcaatcggggcacttgcccttggtgatcggcttgccgtttttagtcgtgctctcgacgggatctttcatttccttcttcgccttgcacttcacgcaatatgcttcaattgccatggtggttgaacctctctgttcgttcctgtgggccgaagccctctttcatactatgactgcataggcggcgcatgcatactctgcctggctcctagtggtcattgctgcggccattatactgcaagcacgcataataccagcatattcgctgggtggccactatatattctttagtaactccataacgaaatccgagttgcgatacaacgtatccggatcgacgttctccaaaacatcgtctccctgcgcgaagaacgcgggtttcgaaccgtccatccccgcgatgctcatcgcctggaaaccatggcgcaacgcaaccgaggaagcgctctccgtccacgcgatcggcgccgtcgaaaattcgacgccggtagcctggcttgctttcttcatatagcgcttcatgcgcgacgatgcggaaacgcggcggaacttgccctctttctcaatgaggctcaaatctcccgcgccgagcgcatcgaggttgatgatcaccgatccgcgcagttcagtgccgtgctctgcaagaaatgcctttatgccggcgttaccggaaagctcggagccaagcgccacgaaccatacttccacgttcacgtcgggatggcggaactgatatacctgctgcagctcttcggaaacctgagggtcgggagaactctgcagatatgccgagccgtcgccctcgtcggcctcttcaccctgattgacgagacggcggcgggagaacgctccgccctgccaagtgcgcttgccgctgccgaaatcatcgtcatcgaaatcgtcgattccgcgggagccgtcgaacgcttcgccctcgtcaagttcgtcatattcgctgtaaccatcggtttcatcgaaggattcctgctggaagctttcccaactgccgcgagccgcaccgacgctgcgggcttcgaaatcctcatcgacgtcgagccattcttgcgggcttacttcttcctgcttgttcttcttgccaaagcggtcgaagaagcggcggacgcgcgatttgggcatctcgacgtagccgggccctgcaaacgcaccggtttcggtaatgccccccatgtagtcggaatcgtcggcatcgtcgacgtagatatcgtcggggtccacattttcgatcagctcgtcgcctacgggggcgaacgttccagtcatccccatcgaagcaaacgatcccgccttgctcacgcttcccgttgcttgaaccgcatcgtcgccgctatcggtctttctgatttcgccgctcagcgagggaagcgcacgcagatcgggtttggcagccgcagaggactcctgatggacttgcgctggatctttgccatccttctcggcggcgatctcatcggcgcctatggagggaagcatggtcaagaggcttttcgccgcgactttcgtcgactgctccgcttcggcaagcggggcgcgttgcttgcccgtttcgatgaccggcggcagcgttgccgccgacaacccgatatcgggaaggacgatcgcgggtttggactgctcggaatcgacttcgggcttctgcaattcagcaacctgtgcgcgaagatcgctcacgtctatcggtggcatggccgtcgtcgaaccaggtgccccaccgacaggttgctgctgcacgctgtcggcagcgctcacaggccccgaagtccacggctcgtcgggaacgcgcatgccatcgggcatcgaagcatctgaaaccgaaccggcctgcgcgggagatgcggcgtcgaaggcggtcggcgccgcttccgtgcgatctgcgttcgaagaatccggctggcctgccgcgtcctgcaccgtacgcggttccataatgccttcgcgcatctgcctgatgcgctgttcggtttccgcgtcgacgatgcggtttgcctgctcgaaatgggacgtgctttccgtaacggccgcatcgagcgcatcggcgtagcgggaacgatggatctcgcccggttgcggggtgcgcggcttcttcgcattctcctgcgctttcctaaaccagtcgggaaccgacgagtcggattcgggctggagtgcgccaacctctgcgaaacctccctgggcagacgcagatgcaaccgccgcagctcctgcagcagcgcccgcagccgccactgcaccggcttgcgcgtcgaccgccgtctctgcttcctgaatctgcccatcggcaacatcggcacccacctgcaccccagccgggatgctcgtgagcgcttcgcgcgtttcgtcgcgctgctctcgtatctcatcttcggtgggttgcccgatgggcgcttctttaacctgcacaagattgctcgcaatatccctcaccggttcgcttgcgggaatcggcttgcccgtcaaggccgcaatcgcggccttcgccgacgcaaggcggtcttcgggggtctgcggagcaggctcgggaggttggactttggcggcttcgtaggcgagtttcgcgccttcgggaacgaggccggaagcgatcgcttcttcttcgccgtgaatgatcgtgccatcggcttcggcgcgcgcctcaagctctgaagcgctgacgcggccccgccccacgcggcgggccacatcgagaagcaccgcggttcccgcagcattggcgttcgccgcttcgttgtaggcggaaaacttgtgaacgatggcaacgatgagcggcaaagcggtgaagaacaggcagatgccgatgatcacgtagaacacgatcgccgtcgtgccttcggcatgcaggaagaaaaagttgcgtacgatgagaatgaggggcaccaaaatgatggaaacgagcaccgcccactgaataaacggcagaacgcccaaaatgggcgctttgagttcgggtcgcacttttccgctgtcgtagcgggctacaaggatcaccttccggcggcgggctccacccgcctcggcggaataccccggttcgtacttcgccacaacgttttggcttaccccgcgggcgagaaaccgcgatacgatcggacggcccgtcgcttcaaacgcgtacagaatcgccgagattgctgtgaggatcattgcggggatggcaagaaccggtaagaacagcgatgcaagggcaacgacgaatgttactgcgcagcaaagcgcgcgcggagtttcggcgttcgaggcgctgttgaaatcctcgataaccgccgagaggcccgcatctttttgcatctgctcggtgatgtagagggcggcttgctgctcctcttcagtcccagcaggacgaggaccgatttcttgcgacagaaacgcaacatgatccattagttctggcatatgcgtgccttccgttcttcatctggtcatatttgcatgtaggcataccgtaggtaagtatacgctatttaccgtttgaccccaaataatcacgaataaatgcatctgcggtcgccgcgacggagcgtgcttcgctatagagcttgccaggttcttcgatatctcgaagatatgcgctcctcacctggtcagaagggctatccgacaacgtttcggcaagcgcggcggcctcctggtcaacctggttgtacgcatcgttttgcgaagctgcggtgtctttgtcgtatgcgaggatcgcatcgtccgaggcgattgcatagtccatcgcggcgatgcgcttctcgatgtattcgatgtgggcggaaagatttgcgctgggatactcttgagccgcgttctcgaattggacgcgcgcgtcggagaacagttccttggcctcgatgctcttcgccttcgacgcctcgacgttttccatagtcgtatccgctatgagcgctgcggcgtcgcgcgcaaggttgtcagcccgaatgacttcggcccatgcaacttcgacgatatccgaagcctcctttgcggaagcggcggtatccatgagaatcggcccttgggagatcatatcgcggcgtgccgctatcgaagcgcgcgccgtcgctatcgcctctttttcctcggaagaattcgattccgattccgctgcctgaaccgaagcttccgccgaatcgagcagcgcagccgcatcgggaagcctctcttcgatagccggcacccttgccgcatcctcgtcgctcatctcgccggtgatgacggaatccatctcaacggtaatctcgtcggctttcataagatcggaaagcgccgcctcgagataggttacccgctcggtatgatcggtgtattccttatagagaaacgatgcgcccgttgccgcaagggcgacaagcgcgatcgcgactacgccgatcgcaaggccgtttcgcacgcggcggcgcatcttccttcgagcaatctcatcgacagggggttcgtacttcttcgtcttcgcttcgggagcgaccggaatgggagacgatagttgggcgggcatgccgaccggtcccttgctcggcaagggcagcgcgtcttctttctgcggagtcgtgtggagcttctttttccccggcagcgtgaacaaggggatgccgccgaaacgcggcaccttcgccttcgagtcgagcccctcccccgcatcggccgcatttttcgcggcatcgagcacgctgaatgacagctcgttcgatgtgccttcggtgtgccgcttgatgtgcgcggcgtgagagagcttcgtatgcttgttcttgcgacccatggtttgcctattgtacggtattcgctctcggcagacgatgcccgacacagaataggcgcgctattccatgtgaaacgagcgtccgtatcagtcggtttccttttcgatgcaacggatcgtttctgccatcgtgcaaatcttgatggtcttgctgggaagcgaattgagaaacgccttgccgtaccctttggtaagcaaccgcttgtcggccaggataagcgatcccgaatccgtagatttgcgaatgagccttcctgcagcctgtttggtttccaaaaccgctgccgggagtacgtaatggctccatgcatgggaatccctatcggcccgctcgcacgagagcggatcgcttggcttggtgaagggaagcttcgggatgaccactcccttgagcgttgcgccgggcgcgtcgaatccttcccaaaagcttttgagggcgaaaagcgacaggtgctcgtccacgaggaaatcgtcgcgcaaccccttcaccgacaccccccacttctggcagaccaacctgagatcgtcggatttgagaatcggctgcactacatcgtagcaccgttccatttccttgcggttggtgaacagcgtgagcatcgagccgttctgggcacggtgaacgccgatgagaagctcctgcagcgcctcgaggtaaccaggcgcattcggctcgggcatgtcttcgacaacgtagaccgtcatctgctcgtcgaagttgtagcttgaaggcagttcgcacatcgaagtctgcgagaattcggtcttgttgagaccgagcgcctgttcgaacgccgaaaatttaccgtcgaccgtcatggtggcggacgcgaaaacgaccgagtgggtgttcgcatacagcgtttcgttcatcttgtcgcccacatcgaggagaagagcctgcaggctttcggcgacccgatcgtttttcttcgaaagcgacgcagcatacgcgtacgtcggcggcgccgatacgagtatcgtctcggctgcgtttatcatttctttaagggcgatcgccgtcgaagctatttcccgctgcaattcggcggcgccgtcgagatcctctagataggcgacgatgtcctggcacgctttcacgagtttttcggccttgtccgaaaacaccttgccgtacgagcacaagccggcgaacgtatcgctgtttcgtatctggtcgtttatccacagctcgacgaactcgtaccccttcgatttgctgctgggatcgaagtacaggaggtctttcatgtgcgcgctgaactcagatgcagcctgctcgaattccttgcccgcgcttcgggccttcgacgtcaaagcgaacagcaacgttgatccgtcaggcgcatcgcccaaccgccgttcggttcggatgaacacgtttcgcgacgcgtcatcggcggaaacgcgcgatgccgtcctcatgatctcctcggcggaaagcgtgagggaaaacgccttgcgcgcttccgcttccgcaccgtgggcctcgtcgacgatccagtagcgaatcggcgggagcaatcccccatcggctacgagatcgcagaagagcaggctatggttggttaccacaatatcggccgactcggcgcggcggcgagctccgtgaacgaagcacagggtgccgaagaacgggcatttccgccgaaggcaatcggtgctcgatgtggtgatggtgtagcgcggcagagcgcggtagtcgattttcaaaccgtcgatatcatcgtactcgctctgctcgatgaaggagagcagccccgcaagcgagggcgcctgcacgatgtccttgccggccacattgcgcgttttaggtcctgcgatgacgatgcggtttatctgccggagacaggggtaatgggaaaaccctttaagggcggcgtaatcgatgccgcgcgatgttagttctccctgttcggtcggttcgggcgcgttctgctccgattctcccgatgcctcgctgcattcttccagcccgacttcccctgacggcgcttcttgctctccctgttcggccgagcgcttcaacgcatcatttaagaggggcagctccttgtacatcagctgatcgagcaaggcgttcgttttcgttgccactccgatcgcaatgttgtttttcctcgccgtcaaagcggcgggaagcaggtaggccatcgacttgccgacgcccgttcccgcctccacagcaagattggtggatgtagcgaacgcctgcctcactgattcggccattgcaacctgctcggccctcgtttcgaaatcctcgtacagagatccgacgatgccttcgggcgaaaacgcctcctctatctcgccttcggagggaaattgcaaatggcgagtgggatccgatgccaacatgtcggcgtcgtttttcgccttccgttcgatcgacttgaccctgttttgtcgcatggctcgcagggaaaacggtatcttcttttcacgtggttcgcccaccgaagccgtttggtctgccaactgccctttttcggcctgttcggcgtcgtgcgattccatatcggactcggctgccatagtcgaatcgaccgcagcagcagctttttctgcaaagtgcgcaaacaccttgacggtcggccactcctcgacggttgccatccctgcgatctcacttacaagtgcgggcggcatcgcgtcaacggcggcgagcaggatgcggtataccgcgcacagcgcctccacgtcggcatcggctcgatgggtcgatatgggagcatcgaacgctcgaacgagatcgatcaaccgatgggatttgagtcgaggcagcgcgatgcgcgcgagatcgagcgagtcgatccacgtgttttccgcaagcggcgtgccatacatgttcttcgttgtgaaattacgatcgaactcggcgttgtgcgccacgatgtccgatgttccaacgaattcgacaagatcagcgagagcctgggcgggagtcggggcatcggcgacgtcttcgtcatggatatccgtcagccgcgcaacatcttcgggaataggctttcccggattcacgaatgtcacgaaccattcgatgatttccccgtttttcatccgggcggcggcgatctgcgtcagttcatcgtggttgacggaaaatcccgtggtctccgtatcgagaacgacgacatcgcgatcgagctctccgtaatcggcgcgcttcgcggtttcgtccaaacgcgcgtaccgatcgcggatatcgcggggcgtgccttcgacgatgtatttttgtatggtatctgtctgttgcgcattatcttttttcatagaatgaagcctatcatctatcatgatgtcgcacaaaccgaaagatcgggacgcggaataatcgcataacccaccacccgcctccctgagagccgaaaagaggaactgctatgccggacatcccttattacggaacgtatgcgcgattcgacactgcgtcgaaaaaggatgcggctgtgcttttgggtgccgacaacctcgtcggagatgtattcgacatagaattcattaccgaagagggagtgaggaccgcttggatgaaaaaccgcttcggcgcgctcgttggattcttcgaaccgggaacttcacgcgaattgagtttgtgcgaggctaaggggtttaagctccaagctctgctctctttcatcgcttatagcgaatcgcctgatccaggtaggtattggggtgaagctgcacttgtttgctacgacccgaaagatgccgccgcattcgaatgtttcacgggaaacattgccgcgcgcatgatggaaggcatacgccccgaagtcgatctgggcgagcagggtttcaacaaggtcatcgaaacaaacggttcctggaaaccgaccaaaacggtccccctccccccgaaacaggcaggcgtcgccctccttaagacaagacggagcgtctcagaaaagatgatcgaacagggccgtaagggcaataaaggctgctacatcatcagctgggtgtttcttcttgcagttgtcgccggggcgctgttcggcctccgttcgtgcggcatcatctaaccacccttctcgctgcattcccgaatgacgcattccggaatgcgaagcggcggcatggcggcacccgggagcacgagggcgaatccagggtgaatcaggggttaattgatggcgcggggcgttattccagcgcgagctcgatgagcttcgtgcagagagcgggaaaatccattcccgcggcacgcgccgcatcgggcagcaacgaggttcccgtcatgccgggaatcgtattcgtttcgagaatccagaacgcaccttcgccatccatgatgaagtcgctgcgtgaaacgcctcggcagcctaaaaccctgtgagcttcgacggccatccgctgaacagcagccgtagcatcttcggataacggagcggggcacaggtgctgcgagccgccgggagcgtatttcgattcgaaatcgtagaactcattcgtcggaacgatctgaatgaccggaagtgcttcggcttcatcgtttccaacaaccgcaacggtgtactcgtctccctcgacataggtttcaacaagcacttcgtcatctatcgcaaacgccttgcccagcgcatcagcgatggcttcttctccctcgacgatgaatacgccgagcgcgctgccttccctcgcgggctttaccacgcaatggcgtccaacttgctcgatgataccttcaaccgacttctcatcaggggagcaaagcgtgaccgattgcggggttcttattcccgcttgcgtgtagaacaccttcgctttcgctttatccatggcaagcgcgctgccccatacgttcgagccgatgtagggaagaccaattatctcaagcatgccctgcatcgtgccgtcttcgccgtattttccatgcaggcagataaaggcgacatcgaaatcaccgtcgatgagggttttcagatcctctttatcggcgggatcgatgaccgtaacgggaaacccagcttcctcgagcgcttttttcgctcccacgcccgacgcaagggatatttcccgctcgccgcttcttccccctgcaagcaaagccacattgcacgtttgaggtgtgaaagtatctgacatgaaaaccctgctccgttcgcactgcggcatacctgccgtcaaaagggcgcggcatgccgtccatttgtaattcgctgtcgcttcacctgccaacatctcgcgtaggcagagacggatgaagtatagcaaatactccatttcgaaccattggctgagcggttaaaacatattgcccaccccgggtcgccacaccgcttcccccttacttcgcattccggaacgacacattctggaatgcgtttataatgcgcttatgaaaaccgacatcaaatcattcacacgcagcgaaatcgacgagctcatcgccgaatgcaagcaaccgtcgtttcgcgcgcgacagctattccaatggctctatggccatcacgcccgatcgtacagtgaaatgacgaatttgcccgcatcgctgaggaccgatctcgaaagggatcaccccctcctcaccggtacgataatcaaccgccagatttcatcagatggaacgcgcaaatacgttatcgaatttcacgatggtgcccgggttgaaaccgtcgctatgccgagcatgcacgaagaatcccctgataggctttctatttgcctgtcgacgcaagcagggtgccccatcggatgctcgttctgcgcaacgggaaaagaaggattcaccagaaacctctccgttggggagatgatcgaccaaatcgttttagctcagtccgatatggatatgaaaaccagcagcgtcgtcgccatggggcaaggagagccgtttcttaattacgagaatacgatcgaggcgttgcgtatagccaactcccccgattccctcaatataggagcgcgtcatatcaccatttcgacgtgcggaatcattcagggcattcagaggctctcagacgagtcggagcagttcacgcttgcaatttcccttcactcggctcaacaagcggtgagagacgctctcatgccttccttggcacatattccactgcgccaactgaaacgttcgcttcttgattaccgggaaaagacgaaccgccgcgtatctttcgaatacttgatgatcaaggatttaaatgacaccgacgaagcgttgaaagccctcttatccttctgcaaagggatgctttgccatgtaaatttgcttcctctcaacaaaacagctggaaatccctttcaaccgagcaccgccgcaacgatgaaacattgggttagcgcattatcgcaacacggtatcgaaacaaccgtccgcaattcgcgaggatcggacatagctggtgcgtgcggccaacttaaaaactctctatagcattcgagcaaataaaaaagagggccgctcgaaacgtcgtcgagcggccctcttttttatttattcctggcgatgctattccgccttctcctttttaaatgaagtcatgctttcgaacaaacgttctaattcttcttcatctttgaattcaatctcgatcttgttcttcccttgcacggttttgactcgcacattcgtgttaaacgattcgcgtaaagcccgcgctaccgttttaaacatcttcggcgtaggaacgcggacggtcgcttcccctttttcttgctttccagaaaacaagcgcgcaagagtttctgcttcgcgaacggatatcttctcctgaaccatcttatcggtcagtttttgcctaccttctttcgaaggaatggaaagaatggctctcgcatgaccagccgagatcttctcctcgaataaaagttgctgggcatcttcagggagttcgaggagcctaagggaattggctatcgtggaacgccctttcgataccgcttgagccacttctgattgcgtcatgttctgacgttccatcaaacgcctgtatccgtacgcttcctcgataggattcagatccgagcgttgtatattttcaattagagcaagttcgagtgctttatcatcatctgcttctttgatgcgaatcggaaccgtcttcaaaccaagagatttgcatgcctgccagcgacgctcccctgctatgatctggtatctccctttcgcgatagaacgaacaaggatcggctgaagcaacccatccctctcaatcgaggttgcaagctcttctatttcctcttgtttgaaataggttcgcggctgatcggggttgggctcgatggaattcagatcaacctcgtcgatcttcttttcctttacttcgcgttcaacgacacccttgatcgtgatatggtcttcctcttcgatataaggttgatgcttttcgttaccagattcgttctcgttttttgagacgacagggttctcttgagaaattgcttcactgtattgcgatttcttctcagaaatggattgttttgccggagtcggcttttgcgacggttttggcgagggaacatcctcgtctgctttcaccatagtgcgctgaaccggtgctatggtctcagccggtaaagcttcttccatgctaccgctcaagagagaattcaaaccgcggccgaggccgcttttattttgtttagccacggattatcacttccttagcaagatcgatgtaagactgtgcgcctttgccagtaggatcatattgggtaataggcaatccgtaactcggagcttcggaaagctttactgtacggggaatcaatgtatcaaacaccgtcttcccaaaatatgatcttacctcgtcgactacttgccgggagagggtcgttcttccatcgtacatagtgagcaagacaccatagatatccaagcttgggtttagcaggcttttgacacgtttcatcgaatcaagcagttttgtcacaccttcaagtgcataaaactcgcattgtatgggaatcaaaagcttatccgctgctaccagtgcatttacggtaaggagtccaagagaaggagggcaatcgacgaagataaaatcgtattttcccctcagcgagccgacggcatccttcaagcgattttcgcgggccatctctgaaaccaattcaacttccgctcctgcaaggttgatagtggccggaataatatcgaggccttcgcaaacatcagggattattacatcttcaaccggcgtctggttcagaagaacgtcatagacgcagtgctccacctgacttttctctataccaagaccacttgacgaatttccctgggggtctagatcgataagaagaacctgttttcccatctcaccaagcgctgccgataaattaattgccgttgtcgatttacctaccccacctttttgattgatgatggcaagtacctttgtttgaccgatcacgtgtttcacagggtctttctctttataggtcttaaggcgtttaggaggtacttcttcgattgtttcacgtgaaacatcacgctccaccacttcaacgtcctcaatatcaatttcttgaacctcattattggaaggaacttcggaagaatcctgagtttcatccggcgtgatagtctctgatatctttttttctcgtttcagaccatcaaacaagcccactgtgccccctttcatggataatctgcatcagtatagcgcaattattcaatcatagtgcagacatgggagtgtttaacattgtttcacgtgaaacaatgctccgctgtatcgctcaacgtatgtttcacgtgaaacatacgttggatttatctcgcaagtacatgtgccccaacgttgattattgtaagaaattcatctcgatcagcccccattgagatgacttcaaaacgtatccccatctaatacctggcaagatcgacttgttatgattgctgtaacggaggtgaccggatgggcttgccaagaaagaataatttagttcctctagcttatcaacttaagcggaatgcaactaaagaggagaggaaactctggtataggtttctctgcacctaccccatcccctttaggcaacaaaagattattggaatctatattgttgatttcttctgcaataaagtaaggctcagcattgaacttgatggttcgcagcatttcgaaaaagaaggcatggtaaaagactcatacagaacacgatatttggaattacttgaaattaaagagttacgcttttccaactacgatatatggaacaatttcgaagacgtttgcgaaacaatacataatgaagtaacaacgaggcgaaacgatatcattacagtacctctcgctcgattaactaataaaaaatagcaggatgtttcacgtgaaacatcctgcccagcgagccatcatacttgaaatgtttcacgtgaaacatttcaaagcggtttcttctgagccattcctgtcctacgcggcaatttcaaagtaggatagccaactttctcaaacaccacaatccttcgcgttgttacgccatcactcaacatgaaactcctgtcgctgaccagacgcatagctaacgtttccttcaaagcaaccgcatgttctaattcgctatcctctatatttgctttataacaaatcagtcttcctttttgttccagcaaggggctcgcaagctccataagcgatgacagggaacttaaagcacgtgcagtaagcacggcgaatcgccctttcttttcaagagcgagttcttcaattctacccccatagcatgttatgcgatcttgaacccctaattccctgaccacctcttctaacgcagttaccttctttttcaccgaatcaaccagcagagtatcgcgcccggatacaagggctaaaggaaccccaggaaaacctcctccagttccaaggtcagcatacaaacccgcaggagcctcctttaattcctgaaatcctgcaagagaatcctctaaatggagaaccctgcccgatttcaaagtttcaattcgagtaagattgatttttttatttacctcgatgattttcaacaggtaagactcgagtaattgcacggtttcaacatctagaccgaaggtaccggctatatcctcaacccaagtatctttttcttccattaaaactcccactatctgccattcacagcgtttttaaaaatagttccatatttcacggcaaaagaaaaggatgtttcacgtgaaacatccttttccattcaatgtcgatttgaagctactgaggtatcaccacaacatgtcgcgcgctgccttcaccttcggaagcggtttcaacccgatcgtcatcgcgcagagtgatatggacgattcgacgctcataaggtgtcatcggacgaagttttatactgcggttctgaccagccgcgcgattcgccgccgaacgggcaatcgattccaacttctgccgttgacgactcttgtatccctctacatcaacaacaacggggtatctgaatcccattttcctaacggtaacagcagaaacaaggaactgcagggaatccagggtctttccgtgacgtccgatcagcacggcaagatcatcgccggttatatcaaggataagctctccttcatcaccttcgtattcgtcgatcgtcacttcgccaacattgaaatacttcaggatatcttggagaatggaaatggctgtatcagccacctcatcgagctcctcatcgctcaactcggggactccgctttcctcggaagaatttccctcgtcttccgaaacctcttcctcggtttccacggcatgttcttcgaattcaagttcgctgttggtttcttccgccatatctatgctccttagtcaattcaagcacggttatatagccaacatccttacatggatgcggttctcggaatttacttgccttttttagtgggacgcggttttttcaccttacgggtaacgtcgacctcgatcggcttgacctcgatgctctcctcagcttccgcatcgcggcggcgcatgatcgccattgaaatctgctgctgcccgacgccgataagcgaagaagtgccccagaagagaagaacgcctgcaggagaattccagctgatccaaagcatgaatatgctcataacgccactcatgatgagcatctgcttcttttgagcgccgtcgttattgcgttgctgaagaaccatgggaaggaatgttgcccccgcgaaaatgaccatcaggattacgtaggggataaacgcgcctattccttccgcaaacgcctgcgagggagtggtgatgaggctgggcaccaaattgtagaattcataagtggagccatgggtacgagtacccatctcctgaagtacctggaacaacgcaatgaagataggcatttgcagcaacatgggcaaacagccggcgaggggattgaatttcgcttcagcgtaaagcttctgcatttcctcttgctgccttaccggatcgtcggcaaatttggtctgtatctctttcatgagaggttggaccttttgcatctggaacgacgatttcgtttgcttatgcatcaaaggggagatgagaatacggaatatgaccgtaacgatgatgatggccataccccagtcaccgccgttagcgccgccaagcaaattgtagaagaactcgataatccagaaaattaaatctttaaatgcatcccacatactcagctttccttcctatataccaaagaaaccccagatcataaagtgtttacggtactggatcgtaaccgtgggggcctcccggacgacagcgtaatatcctcttggcggtaagtttgaatcctttgaagaaaccataacggcgaaacgcgattattccgtactgagaacaagtaggctcgaaacggcaacacgaagggaacaagggggaaattgcagcttgatagaacgtaatgaggaaaaccgcggctgagcacggtatcttctttataaaacgtactatcttatccatctcacaaccttattgagaggttcgtaagccgatgtcgacaagcgccttttcacacgcatcgagaactttactataaatagcttcagtcgtacgtcggcgagcgagaaatatcacatcgtagcgatcccacggtcccccgagatcccggcaaagcgctcgcattcggcgctttgctctgttcctccaaactgcgttaccgagttttttacccgcaacaaaagcaacacgacctgtttggccgtgttgcttctcattctgtaacacaatcaatgtaacaaaaggagtgttcaaacgcttcccgtgcgtaaagacatacgaaacttcggtgctggatttaattgtttccaacacgagtacctatctttacgcgcaaatgcgcttgcgtccttttgcgcggcgagcagacaatacggcacgaccaccttttgtcgacatacgtgcacggaaaccgtggcacttcgcacgcttacgagtgttaggctgataagtgcgcttcatttcacaatcccttcatggttcaagagtaacttccaaagtatataccgaagagcactaaagtcaaggtatttacgcaggtaattctgcatagattcttatcttggcatagtcgtcgaatcgttgcgtagcccacgcttcttcatgttgtagttgaaggtgtcctatcctcaatatgtaggttccaaagctcgaagatcagatttccccaaaggttggttttattttgattcttaaaatatataaatggtttgaatagttgtaataataagggcagtggaaatgttgataactgatatctccgcagatcaatctatgggatagaagacttttttcgtgttgagaatcagctctctccctcaacagtttttatcgcttttattatcattcccaattcatcccaaggtttttaaccaggtttgagtcataaatgcctcgtttgttgcggcctttaaggagacgcgcggtaaagagactcccaagactcaagcaattctcatgaggtagacagaaccaggatgtcagatttcgcggataagctgcttgagggcttcgagttcttctctcagctccctgctttccttcatcttctcttcgacgtttgttactgagtacatgactgtgctgtgatcgcggttgaattgctttcctatatcgttaaaaggcagatcgagcagttggcggcaaagatatatgcctatctgacgtgcatagatgatattgcgtgttctttttttaccgatgagctcggcatgactgatcttgtagaagttctcgacttccttctgtatatccgaaactgtgagccgcttcgacgggccgccggagaagtggttctcaagcagatcccttacatcggcgaggctgatatcgggctggttgaagaacgtcatctggtagataactttggtcacggcgcttttcagctccctgatattggaactggagctttcggcgatgtaaagctggatgtcttcggggatgctcaactcgcgaattccctcgttgatcctgtattcttcgacgaaactcttcacgatgccgagcttcgtttcgatttcggggggctggatgtcgaacgtaccgcctgaattgaagcggcttttgtacctctcgtcgatatcgatgttcttcggcgctctgtctgccgagaggacaacctgcttaccttggcttgtgagcttgttgaatatttgaaaaacgatatcgagcgtctgcttcttgccctgtaagtactggacgtcatcgatcagcagcacgtcggcgtcctcgtagcgcgttttgaagttcttatagctggatttttctttatcgtgtgccgccgatgcttccatataatcgcttaagagctcagccgaatccacgtagatggttgaaaggtggggcatggtttcgatgatgtaattctggatggccctgagaagatgggtttttcccaatccgctctttccgtaaataaacagcggattaaggtgcgctttccccggcatttcggcaaccgctacagccatggaatacgccatacgattcgaatctccgatgacgaaattctcaaacgtaagacttgatgtgggttttcccatctcatcgacatcggatgagattccatgggcggcatattcctcagcgccgaccggggaagacgaaggacctccgagtccgactgatgcggctccaccggctgcatgggacggggaagcgtagggttgagatggggagtacgggttggactgcgcggcgggggtagcgctgaccggttgagttgcagcggccggcatctgcgtttggggttggacaggcgaggattgcacaggagcgggctgggcgtttgcctgcgccgccgttacatcgacctcgatgacgaccatataaggaatatggtaaagatcgccgagcgcttgtttgataacttcgacgtagtgtttttcaatccacgtcttgatgaaatcgttgtcggccgtgagcatgaggaacccctcgctcatcgcctggggatgcagccgtgagaaaaacgcgttgatttgagtagggtcgatgttattgtagctttttacctggctacatacatctccccatgctttttcgagcatttcgctgtccatgccatacatcctaatcgttgttccgaagccgatcgagcgatcctgtttgtttgcaaatcaggatgcaaacaaacaacgaagtacaggaaaccacatcggcgaacgaaaatagacgccgattatacgctctcgctgtgattgtagtaaaaatacgcagggtcggcaaaagaagttagagggaattcgctactcgaaaccctaaatcggtcagaattcgtttctgattcactgtcttttcgataaggccgtattcctcgagctttttgagcgttacgtacgtgctcgattggggaagtccggtgaggttaaccaaatcggtcactccaagggccccttcgtgaaggaagaacggcaaaagctccttttcccgcgaactcaacgggggagtgagagactcgattttcggttgatgctgttcgttttcggccttaggaggagcaagactgacggttacgacggccccgcattcgagattgtcttctatcgtgatgttgccgtttgaaaaatcaagataatccttgacgatcggaaggccggatcccactcctcgaatatagtgcttcatcggctctatcgcagaagtgaatccagggagctgcgctttgtccttgttggcgattcccggtccttgatcggaaaaccgtatggttttcccttggtcgaggatggatacgattatttccgagaattgggcgtgaatgaaattctcggaaacttctctgataacggtatagggaatggtgccacctgcaagctttgcctgttcgtaaattttcgatgccagattttcaatgaattcagctgttgtgttcggttgaatttcaatgacacgcggcgcgctgcgcagatcgtcgtagaccgcgatgcgggcaatggtttcaacgaatgaataattgaaatcagccttgttcccatcagcggatttagaagtaatgttctgatctgtcggcatggtattcagaaaaattcctcgtatattcaggtctgttcagaaaattattcaatcgtattcagccatattcacacgatttaggcaagactacaagcattctacgtgttttcatgcggttttcagtcgattattcagaagtcttcaaaatggaaacgtagttttacaggcagttttccgagttatccactttttattcagaaattgttgaaaacctggaaaatgctttcagaggaacgtgaaaaacggtgaagaaaagcttgccgattgttgaaattattgcttgacaatcgcctaaaacaagttttcccagatggtttgaattcacttgagggaaatatcaaatctttgttcgctttttagttgcaaaggtctgtatttgaatcatcattagctggtatgaattgtgttataccagttcaaacagtatatttatgataaatagacgagaattgtaccaagaggtgttgatgtaaagaatttcgaaaaagattgcttgactttgcttcgatttggagatttccacagcttcctgcgaataaaaaaatagttttccccattttccacaacacaaggaatgagaaatgtggaaaaacagccatcttctcaagagatatcgccttttctttccatgcatgaaagaaaaagttgaatatagggaggtgaaaggggtgtaaagagcggcagggtaattagcgataccgaaaaggtggctaagatccaatcgaggaaggtgaaagtgcggcccgcccgccgcatggaggcgggcgggcggtaggggcggctaaatggtttggccgcgcagtttggagaatcgcgtaccgtcccgcttcattatttgagatactgattgcaacggagaacgaaagggagccaacgtgaagttcagcatcaatcaaaccgaattgcaaaatgcactgacgatcgttatgaagggtgtttcaacccgttcgacgctgcccattctttcaggggtctacattcaagcgcacaacgattctctcaccatgcaaacaacggatcttgaactatcgattcaatatacggtagacgctctcatcgaagaggagggcgaaacggttgttccgggaaagcttttcgccgagataataaagaacctccccgatgccgcggttcacgttgcgggcaatgaagaggctgtggtcgttacgtgcgatgccgcatcgttttctctgaaaacccttaatccgcaggattttccgggatttccaactgtcgatgtccatcaaagcatacagatacccttcgatcggttcgcgacgatggtgaaaagggtcgctcgggtcgtttcgaaagacgaatcccgcgctattctcacaggcgtcttgattacgcttgaggacaagctcttgaagatggtggccactgattcgtatcgcctcgcggtaaccgaagccgatgtgcccgatgagatggcgggcgatttcgaagcggtcatctcgggttctttcttacaagatattgcggcgctgccgaaaacggataaccccgtttccctggcgctcgcggaaaaccagatagtcgtcacgtactgcaacacggttttcgtcaaccggagaatagaagggaatttccccaactaccggcaattgcttcccgattcttatgtgacccgcgcttctatgaacgtcggacatcttattgctgcggtaaagcgcgcgtctctgctcagcaacactgcaactcccgtgaaattcgatgtgaatgtgggatcgcaaactgcgcttctttcgagcacggcccaggatatcggatctacgcaggagactctttcatgtgaagctgagggggaagatgtagagatagcgttcaactacgcgtaccttcttgatggactgagttctgtgactaccgaaaaagtttatctcgaggcgcaatcttcaatgaagccggggatattcaaagccgacgagggcgaaaatttcctgtatctggtcatgcccgtccgaatttcctaatatgggcttttcttcgggatcttatgacagccgatcttgccgatagcaaagatcttcggatcgactcgatctcattcgagcatttcagaaactacccttcgttcgaactgggcgatatcggtgcgttgacggtgttcgtcgggaaaaacgcggtcggtaaaacgaatatcgtcgaaggcatcgagcttttaaccgccctttcgtcgtttcggaacccgacggcgcgccagttgatagcgtggaactcgaataccgcaagactcaaggcgacgtttctgaacgcacggcgtcggttggatgtcgagctgaagatggaagacggaaaacggtcgtattctctcaacgggaagccgaagaaaatccagactctcaaagggttgctccctgcggtttcctttacgcctgacgatctcgatctcgtcaaaggatcccagagcggaaaacgcgcggcactcgatgcgctcgggtcgcaattgacttcaaattactatgtgatccgaaaagattacgagaagatcctgcagcataagaacaagcttttgaaagaggagggatcttcgtcgtacctcgaagccatcgatgagacgttggtgagagtaggtgcgcaactatattgttatagaagttcgctgtttgcaaagcttcttctggaaattcagaagtactatcgcgagataaccggcggcatagaatcggtacaagcggtgtacgttccatcatggcaagaagccgacccggagaatatggaaaccttcattctctcgaaagaagaagcgactcagcaaatgtacgaagcccttgttgggaagagggaagatgagcgacgccgccatcgcgccatcatcggaccgcacgctgataaagtggaattcttcattgaaggaaagaacgcgcgcatctacgggagtcaggggcagcagcggtcgatcgtgctaagtttcaaacttgccgaagtatctttgatccgcgatatgctcgatcagaagccggtgctcttgctcgacgatgttatgagcgaactcgatgaacagaggagaaacgccctcgtcggatttatatcaggcgatatccaaacgttcataacgacgacgaatctgcaatacttcgcaaacggcattcttgatgaagcccgtgtggtcgaactggggtgctgccgatgaggaagctgtcgaaaagcatgccggcaacgctgctggcgatggggcgggataacggcgatgcagcgaggattgcccgaagaactgcggaggtcaggcagatgtgggcgaacgccgtcgagaagatgtggcgcgatcccgaagcggcggccatgattctttcccatacgaacggcgtaggcatcgtcgaggagaaaaaccatcgagatgaaagatataagaaactctacgtgtatgttgacgatagcatcgtccttaccgagttgaatgcgctgcgcgagcgcattaaattgctgtttctggcggaattcaacgaagacgtccaggagttcgaaatacgaatctcacggggagcccggaagaaagaccgcccttacaaagaagaggaaccgccgccctacatcgataaaactcctgccaaacccctttcggcagaagagatggaagaggtcgagcgccgcgtcgcttccatcgagaacgactcggttagaaaatcgatccgtaaagctatgattgctgatttacagtggaaaaaagggcaaaacgagaaaaatgacaggtgagaccctaatcgtcgcttgtgtgcgttctctgttgccttaaacgcgttcaaaaccgatatcaccaaactactatatatggtataatttgcaggttgtcatgcataccgtctgataactcattacatcaaaaaaaatgcagtacaaaaggagcagtacgtggcgcagaaaaatcctgagcattacgatggttcggatattcaagtccttgagggtttggaagcggttcgcaagcgtcccggcatgtacatcggctcgacgggtccgcgaggcctgcaccatcttgtatacgaggtggttgacaactccgtcgacgaggcgttagctggatattgcgacaaaatcgaagtgtggatacaccccgacaattccgtcaccgtttccgataacggacgtggtatcccgatcgacaagcatccaaaagagaagatcccgaccgtcgaagtcgttttgaccatcctccatgccggcggcaagttcggcggcgaagggtacaaggtgtccggcggcctgcacggtgttggcgtgtcggttgtgaacgcgctgtcttcgcgcgtcgaggttttcgtcaaacgcgatggcggcgagtacaagatcgcattcgaccacggcaaaacctccgagaagctcgctaaagtcggaccggcgaagggaacgggaacgaaaacgacgttctggccagatcccaccatcttcaccgagacgaccgtattcgactacacgacgctggcaaatcgcttccgtgagatggccttcctcaacaaaggactcaaaatagtccttcatgacgagcgcgatctcgacgaagagggcaatccgaaaaccgaggtattccagtatgcgggcggcattcaggacttcgtgaagtttctgaacgaaggcaaggaaacgctcaacaagccggtttacttcgaagctgaaaacgatgacggaacggttgaagtggccatgcaatggtctacatcctattcgaccaattccgttcttgctttcgcgaacaacatcaacacccatgaaggcggcacgcacctcgacggcttcaagcaagccgttacgcgtaccatcaacgaatatgcgcgcagcaaaggcatcctcaaagagaaggatcccaatctttcaggcgatgatacgcgcgagggcctggcggccatcatctcggttaagctgcacgacccgcagttcgaggggcagacgaaaacgaagctcggtaacaccgagatccgtccgctcgttcagaacgcggtgactcaagggcttgccgagtatctcgaagaaaacccgacgccggcgaagcgcatcatcggaaaggcgacccaggctctgaaggctcgcgaagcggcccgaaaggcacgcgagatgacgcgtcgtaagggcgtgctcgattcgttcgcccttcccggcaagcttgccgattgctcgagcaagacggcatccgaatcagagatattcatcgtagagggcgattccgcaggcggttcggccaaacaggcgcgcgaccgtaagtaccaggcgatccttcctttgcgaggcaagattttgaacgtcgagcgcgcgggtcttcaccgttcgctttcgtctgacacgatctcgtcgctcatcacggcaatcggaaccaatatcggcgaggatttcgatgccgatcaggcgcgctatcatcgcatcatcatcatgacggacgccgatgtcgacggcgcgcacatccgttgtctgcttttgacgttcttctaccgttacatgcccgagctcatcacgcgcggctacatctacattgcgcagccgcctatcttcgggcttaagaagaaaaactcgcgttcgccgaagatagagcgctacatctacgacgagtcggctctttcggcaacgcttgccgaatacgacaatcctgacaagttcgatgttcagcggtacaagggccttggcgagatggaccccgatcagctgtgggaaaccacgatggaacccgaaacgcgcacgttgcttcaggtgaacatcgacgatgccgccgaagctgagcgcgttgtaagcgaactcatgggcgatcaggttgagccccgtaaagaatttatccagaagcacgcacgcgacgtgcggttccttgatatttaaggagatagtacgtgactgacgaaacaaaagatttcgattcgaccgatgaacccgaggacggcgacgcttcgctgcccgaggatatcgatcggctgctcgagcgcgccgagggtgattctgacgatgaggatcaagatgacgaagaagacgaagccccccgttcaacgggatcggcgatgtcggaggaggccgtagcgcgctccctcatagccgataatcttccgagcgctcatggtgagatagtggaaggggccaacggcggcaacggcacgatcgtacgtaccgcgtaccttggcaaggagatgcagacttcgtttctcgaatattcgatgagcgttatcgtcgcgcgcgcccttcccgacgttcgcgacggtttgaagccggttcatcgccgcattctgtacgctatgaacgaatcgggatacactcccaacaggccgcatatgaaatcggcccgtacggtcggcgacgttatcggcaaataccatccgcacggcgacacggcggtctacgacgcgatggtgcgtttggcccagccgttctcgcagcgcgtcccccttgttgacggccatggcaacttcggttccatcgacggcgacggcgcggctgccatgcgctacaccgaatcgcgcctcgacaaagcggctatggagctgctccgcgatttggaaaaggaaacggtcgatttccagcccaactacgacgagagcttggaagagcccaaggttctgcctgcccgcttcccgaacttgctcgtcaacggttcgcagggtatcgccgtcggcatggcaaccaacatcccgccccataacctgggcgagacgatcgatgcgacatgcctcatgctcgacaatcccgatgtgacgaccgaagagcttatgaaggtgcttcccggtccagacttcccgacgggtggcatcatcatgggccgcaagggaattctcgacgcatacgaaacaggccgcggttcgctgacggtacgtgcgaaatgcgaggtgcaggagaagaagaacggacgcagcaccatcgtcgtttccgaaatcccctatcaggtgaatcgccagcggctgctcgaaaaacttggcgagctcatccgcgacaagaagctgcccgaggtctcaaacgtccacgacggcgcagaccgccacggcatcgacatcattatcgatctcaagcaaaatgcgattccgcaggttgtgctcaacaagctgttcaagcacactcagctgcaagttggattcggcgtcatcacgcttgccctggtggatggtgtgccgcgcgtgctttcccttaaggaaacgctgcattactacatccagcatcagcaggaagtcatcgtgcgccgcactcgttacgagcttgcgaaagccgaggagcgggcgcatatcctcgaaggtctgatcgtcgcactcgatcatatcgacgaggtcatctcgatcattcgctcttcgcagaccgatgcggaagcatccgaacgtttgatggggcgtttcggcctttcgaagaagcagaccgacgcgatcctcgaaatgcgcctgcgccgcctgaccggcttggaacgcaacaagatcgaagacgagttgaaggaactgcttgagaagatcgcatactacaagcgcgtgctttccgatgagtcgctggtccgcgagatcatcaaagaggagcttctcgaggttaagaagaagttcaacacgccgcgccgcacccgtattaccgaagcggctaaggatttcgacgtcgaggatctgattgccgaagaggacatggttgttacggtgaccaaatcgggttacgtgaagcgcctgcccgtcgcaacctaccgtcagcagaagcgcggcggcaagggcatgcagggcgtgaaccttaaggacaacgatttcgtcgagcatcttttcgtggcttccacccatgcttacatgctgttcttcagcacggcgggcaaggtgtaccgcctcaaggtttacgaacttcccgaagcgtcgcgccatgcacgcggtacggctatcgtgaacctgctgccgctcgccaagggcgaaaccatttcagccgtcatcgcaacgaaggatttccccgatgacgagtacctgatgttcgcaaccgagcacggcatggttaagaagacctcgatgggtctgtacgaccgcacccgccgcgacgggctgatcgccatcaacctcaaagacgatgacagcctgatctcggtgaaacgtgttgctcagggcgaaaaggtcatgatggtatcatcagccggtaaggcgatcatgtgggatgaatcggaagcccgcgcgatgggtcgcgacacgatgggtgtacgcggtatgaccgtggctcctggcgtccgcgtgctcggtatggaaatcgccaagcccggaacagagcttttcgtcatcaccgagaagggctacggcaagcggacccctgcttccgaatacccgacgcaccaccgtggcggtcagggtgtcttcacgatcacgatgaccgagaaaaagggcctgcttgcagcaatgaagatcgtccgtccgaccgacgagctcatgatcatttccgaggaaggcgtcgtggttcgcacgcccgttcagggaatctcgcagcttggccgttcgacgcagggcgtgtgcgttatgaaggcttgcgcgggggacaaggtgacggcggttgccgtttcgagcacgggcaagaagcgcaaggtcaataaatcggtcgacgaacccgagacgatcgttgatgccgaggaggatatcaaaaacgcgctcgatggagaaatgagcgaagccgatatcgatctcgacgatgacgacgccgaaattgagggcgaagaaacagaagggcagtaagatttccgcgtgctcgaatcgcggtgcaaaatgagaaggccggacgggatacagctcgtccggccttcctttctgggtgaacatgcatgctggcaatcaggcgcaatgcggccaatcgagcgagaatcaatctggtttcacgagaagtcgaacaaatgtttcacgtgaaacatcgcgaaatgccgtgcaagcgatgtgcgcctggaagatttactctccgaagtcttcgggcgccaagtcttcaacgaacttgcggaattcttcgacttccgcttctttatcggggttcgatttgaacacgtagggaaacgacgccttctcaagcacctcttcatttatgtagataggcgcttcctgacggatggcaagggcaagggcgtcgcttggacgcgcatcgagttctatcaggcggctgtgttggcgaagcacgagtttcgcgtagaacgtagggccgttcacctcgttaataagcacatgatcgattcgcgcatcaagattagtgagcgcatcgagaaaaagatcgtgcgtcatcggtcgcgaaaagcgagccttttcaagcgcaatgcccatttgggttgcctcgttgacaccgacccaaatgggcacgatgcgaaatttattgttctgcgaagtctcttcgatcggctgtaatacgataatcgagggggaggatgcactcgatacgatgagcgtttgaattttaacgggaaccatgagcacctccttgaaaatcaacggcgattcgtttagttttgctttcgaacgaatccgtgctagtatggtagcagaaaaaagttcttgacccgctgacttatcttgttatacagtgttcaggcactttttttacgggcccgtagctcagttggttagagcgcacgcctgataagcgtgaggtcgctggttcaaatccattcgggcccaccattttttgcgataaacgctccaccgtgagccgagtttgccggtggagcgtttattaatgaaaaccgtaagtgtgcatcatccgttcgggaagccgaacaccccgtatggggccttagctcagctgggagagcgcgggctttgcaagcctgaggtcaggggttcgatccccctaggctccaccataggagaattagacgaacaccgtttcaactggtgttcgtctttttttggcggcgtgaaattgtcgccgtaatagtcaaaagcgaagtacaaccgcacttcggctttgtcgatctgcaccgcccgcacaaacattgttaggatttcttgcgggttcatttcttcggctacattgtctagccagtccatcaattccgaaaagcccggttcaatgttttcattggccttggctatctgatattcggtttccaacgcatctttgcgggctttcaaatcctcaatgcgttctttgccgcccggtggcgctatgccgtcttcgatggcttgccagattcgttcaaacgcggcatcaatcctttttatttccttgcgtaggcgctcgctttcaagcggcgcatcttccatggtggcttcataggttgccatgccgtcggcaatgcgcttgcgcacgtcggggcgctctagggcgcatatggtcatgtccactatggcatcttccaaaatgtcgcgcctgaacgtgcgcttgcacttcttgcacttgtaataggcatagaccgtgccactcttgccggtgccagacgttccggcaagagtgttgccgcattctgcgcaataaagcttgccggttagcggccattctgcggcgtggtctacgcggcggcgcgggcgcggattccctaagatgcttattagcatatcttgttcagctttcggccagagcgcgggcattccaccttcaaccacgtgcccggcgtagctatacgtgccgccattttgcgggcgcaacaacagcttctttgcgcgatcatggttaatgggctttccctgacgtgtgcgcacgtttgcaacagccctgaccacttcggcgattatcgaacctgcaaacaccatgtttttcattttgtgcagcaccgcagcttcgcggtcattgataacgtagcgcccttctacaatgtcccaaccgtagagcgtgcggccattcgccatgcacctttgcgcgttcttctgtatgccgtcaatgatgcgttcgctgtctatggcgctttcccattcggccagcacttcgagcattcccaattgcagaacgccagccgaaccgctggcgatttcctcaccggcgtagagaatttcaacaccggctttgcgcagcatgatgcgcgttagcgccatttcgtcacggtttcgcatgatgcgcggcaccttgtagatcaccacgtaatcaaacagccctaaccgggcatcgttcatcatctgtttgtattcgcgccggtcagtgttgcgccccgtcttggcgtagtccgcatatatcttcaccagttcaaggccgttttcagctatgtagcgggtgccagcgtcaacctgtatttcgatgctttccgaccgttggttgtgtgacgaaaagcgggcgtatatagccgctctacgtttgaccatgataaaatcaccttgcctatttggtattgccccgcgccagccgtcaaacctgcgcggggtttttctattgttcgggaatcgtgattgtgtctgacagaccaagaacgaaatcagcggagcaatgaagcaggttaactagcaacctgatttcctcaccattgggcgcacgtttcccgctttcccaacgtgaaatagtctgtttatgcacgccgattgcttccgctacttgatcttgattcaagccagcggctttgcgtgcaatcgctatacgcgaaccaatcaggcgttttacattttcgttatccatttgcctaacctttcccgcttgtgagccttgcggataattgtatacaaaatattgttgacgcgctagaccgttcggcttattatctaaaccacaaagtaagccgtttggtttattttggaaacacaaaggcttatacgagcagaaagaaagggggtaggaattatgggcaactatcgcaaagcacgcgagcgcaagggctataccgcccaagaagcggcaacgcgccttggcgtatccatcaccacgcttggttcatgggagaacgggaaaacgtcacccactgcgcaacgcctgattcagctttgcaagttgtacgaatgcacggcagatgaattgctaggcatcgtgccttttgcagcagcttaacgggcatcggtctagcgcgttggttctaagaaaggagaaaaaccaatgaccaaaccacgaccgaaagcggaggttaaccaccatgaaaaccaccgctaaaaccattggttacaacgatggtttgcgaggaacccggcggcaagctggacgcagtgcaaatggctttctttcaaagccttgcaaccgctttacgatgccgccccagaaacgaagcaaccgcacggctggtacccgcacggttgcgcgtcaaaaatgcggacagcaatttgacgaagaaatcttagcacgttggccgcgcctttggcagcgcatcgccgttggcgctctgctggcgctcacaatgtccggcattctgcccatggccgttgccgctttccaaatttggcttggcgacacctacgggcttgggctgacggctctttgccttgccgctgacgctgccgtgatcgtgtggctggtggtgcggcatgggtaggcaagccatttcgcagccgccgcacagcgcttccatggacgttcacggcttctggaacgcctacatagaccaaggcggcggcgttcgcgtgcggcatccgctgccgattcggtggaacgcgcccattgacgaagccgaagcggctttcaggcagcttctaaagcggctggaaagtcgcggtgaactatgaacgtcgatgactacacgcagcccgtggaagccgtcatagcccaagaacgcgcctttgtgttcccggtgccgctcaaagccgaaagctaccgcgaattgttcaacgagtggttgcgggtcaatcccaaggcggcgcacgaaattgagttgacggcgcttgccattcaccggcgcggcttgcgggtgtccacgaagtacctaattgagcgcgtgcgctacgagagcgcttacaggcttgtagcggtgccctacaccgaccagcacggcatcacgcaccactacagcatcaacaacacagttaccccgctgcttgcgcggtggctgctggaaaacaaccccgacttgcgcatagagacgcgcaaatccatgttcgacaggaaggacgaaaagaaatgatgaccaacacgaagaaagccaaagagcgcatcacggacactttcgcgctgcttgattgcgtgggtgccgatgttgccatagtcaacgccgacaccggcgaaaccatcaagcttgattcaacggcgctgttcgccggtctgcaagccggtttggttctcgcggcggcgatcatcgaagaacccaagttgaccgagcagcgccaaatggccgctgtcaccggcagcatcaagcaagctggcgcaatctaccttcgccgcaaggacagcaagcacgacgaggtagccgcgagggttgccgcaatgcacgccgaagcagaggggtgcgaagatgcctaacgcaagcgaacttgcgcaagaccgcttggcgtacttcccgcacgattccaacgcgtccaatgacattaagtgccagcgccttatcaggcggcttggttggagcggctacgggcgttggtggcgcgtgtgcgaacttctggcatccaacaaagggcacgtaatcccgttcagcaccgaagaagataagttgatcttgggtgacgtgctgcaattcggcgacggctccaacttctgcgaactgctttgcatcgaagaggttacggcgttcgtagatcagttgctaagcatcgggcttttgcagaccgatgaaaacgggtgcttggaaaatccccggatgcacgaaaacgcgcttagtttcggcaagaaacgtgcagccggacgcaagggcggcagaccgcgcaaaaacccacagccaaaccaaaacgcctgatagacccatgaaaagcgcgagaacgaaaaccacacggaaaaccgagggtttccgatatgcaaaaccgaccattaaaaaactgcgaaagcaatatctatgtctaagtctatgtctaggtctaagggattcggtttcggtcataaaaccgaaaccgaaaccgaatccctgttgcttgtggcattgactaacaagaaagtttctctttcttggttcttctttctgggcatgaaatcgctttcgcgttcctcaaagcctgattttgcagttttcaacgcgttttccacaaagttttacacattcggcaagattggaggttttgaccatgccagttcattacgaaaaccacgttaagacgcgggaatgcccgaagtgcggcattcaacgtccgcttgattggttcgccaacgagggtgaaccgtgctggaagtgcaagaaccttgcatggaaggacaagcgcacgcccgaagatggcttgcttggctccatcagcaagcgccacggaaagcacgcgaagggggcttgtgatgaccttatcggataagttgacgcgcgatcaggtgcgcgacgctataacggccaatctgacctattcgcagattcagcccaacgacattagggcgcttgaaggtttcctttgcatcgaatacgcacaccatgagcgcatgggcgagcatatggaaatgcgccctagctatcgcaaggctacgcagccggtaatcaacccggcatctacgggcggcattgaagatgcctacttgcgcgtttcgggattctacttttcggggcgtgaagcggtcagcttcaacgcagacggcttcataggcattgccggttgggctgatgacacgaacgtgcagccgtttctaagggcactcatgcgatggctcaaagagtggatgggatgcgcacgcggggtaccgcgcagcgcgattgccgacccggcggcatacgctgccgcacttgcttgctagggggggtatctcatgggacttttcaacgcacgcgcagcggcaaaagaagtggcggcgcagatagagcagccggacatgagcgccgccgaacttgaacagatggtttatgcgacctaccaagaaaagcttgatcttgcgaagcagcttgacaccgcgaaagcccgcattgaatcgcttgaagagacgttgcaggaaaagacaacgaagcttagggcggcggaagagttcgcgcggcaaagcgaatcagagcggaaaagcaccgcttcaaaaattgagcctttggagcagagcaagaagcagcttcaagccaacttgaagcaggaaaaggcacgcgctgccacgcttgaagtgcggattgaggaattagagaacgccagccgtggccgcatggcggcttaccggcgtgaactgattgaggaaatgcagcggcaagccgtctgcgcaagcggtggttggtcaaaagcccgcgttcttggattcctgggcggtttcctgccggaaacggaagaggtcacttcatacgacggcagctttattgaggaatacgacagcgagccagagccgcgcagaagcgccaaaaaggcgtaaagggctacagatacccacaaaacaccgaaagacggccacagcggccacgagaaccgcgaatgcggcgaaatctaggaaggtcagaagatggcaaaagacacttggccggatttgagcacccggcaaggcttcattgaagccattgagcaagcagggcagtacatacgcgaccacgcaagcaatctgcttggagagtacccaagcttgctttgcgagttcgacataaccgcgcgtttccgcttcgatgccgtgcctaccgtggagatcaggcgcgaacacatagcggcaccactggacgaataccagcaacgccgcgcgggcgctgacagcgtggaaaaggtttgccgcgatatgtaccgggaaatcatcgaccacgacgcgaagcatccggacgaagtaccgccagcagatgacaaacgtgccttgtacggcgaccggctgcgggcgctgggggtggcgctatgagcgacgttagcttgcagcagatcgaagccgccaaagatgcggtttcacaccctagccactacaccagcggcggcattgagtgcaaggacgctatggcggcaatgatgggcacgggctattgcttgcagccgtgcgccaacgacggcaaggccgtgaaccttgcgcccatagcgctttattggtggggctgcgcattcaagtacctatggcgctgggttcgcaagaacggcgttcaagacctgaaaaagtgcaagcagtgcattgattttctgattgaggaaatcgagccgaaaaccaccaccgaaaccaaaggtttttgatatggataacaaacgcgaaaagatcattgagcgcatcaaaaagcttatggcggttgcagaggacagaggggcaaccgagcatgaagcggcagcggcggcgctcgcggctcaacgcctgattgtgcaatacgacgttgagcaatgggagattcacaccgccgaggaagaacccattgaagaggtttacgtaagccacgccccgcgccggtggcgctggcaccttgcacgcgtgatagcgcccgcattccgctgcaaataccttgaaacgaccaagagcgcgtttcataagacgaattggcgcaatgaacacctgataaccttctacggctacaagaccgatgccacggcggcggcaatgacgtttaataccctgtacaaaatcggcaaccgccttgcttcccggtattctcgcggcgcagcatacggcacctataacgcctacgtcgtgggtttcgttgcaggtatcgcgtcagagttggagaagcagaccgaagcgctgatgatcgttgttccgccaaaggtcaaggagaagtacgaagagcggtttaacggaatcaagggcgttgacaccaccttgaagcttgggtgcgggtgggacgctcacaacgccgaatcgcagggcttcatggatggccgcgaagcggtcaggtcacaccgatttgaagagcctgaaaccgagtacgtggcagatgccccggcgctgatgggtgcatgacatgagcgcttgcaaggtcaaatggagcaaggcgcgtgaagtctggtacgcacgcccctaccttgggcaaacgccagaaggtaagaagattcagccctatagggagttcccggcggcgcacgacgaagcggaagcgcaggaaatggctaacgcttgggcggctcacctcacggctgacggtctggtagcaagtgcgctgattgccgacctgctggacgattacacggccatgagggagcgcaacggcgcaagccctaacagcgtgcgcagctataggctgttcgccaaatacgcccggaagtaccttgcaacctcaaacgctcgtgatttgcgcgtcgccgacttcaaccgctacgaacaacgcttgatggtgccaaaggaactaggcgggcaaggcttgtcccgcaatagcgttatcaacgtccacaacttcatgcgcggcgcatataagttcttcgtgaaagcgggcatatgcgacacaaacccgatcattgacgttgagaagccaagccccgaacaccacgaagcgcaagcgctcaacatcggcgatttccgcaagctggacgcgcagttaaaaccactgctgaaaccagaggttttgaacaagcgaacgtggcgcaaggcgctgaacgcctttgccgcgtggttctcgcttagaaccggcatgagggttggcgaggtgtgcgcgttgcgtccgggcgagatttaccgggcggcaaaatacgtccacgtaggcggcaccgtcattgagaagaagggcgagaaaccctacaggcgcgacgttaccaaaggccgcaagtgccgcaacatcggcattaccacaagcgacattgaaaccattgatgcgttcatggaacttctccggttgttctgcggcgatctgccgagcaacgcgcctttgctcacggttgacggcggctatcttcgccctaacagcgtttcacgcgcattcacgacgtttgccggaaaaatcgaaatgccgcaaggcttcgtcttccacgacttgcggcacacacacgcaacgtggcttctgacccacggcgtagacctgaaaaccgtttcggagcgattggggcacgcggacgaagcaaccacgcttcgcatctacgcccacgtcttgccggggcgcgacgcatacgccgcaagcgtcttcgagcaagcggccatggaagccacggcagaccttgaagaggtgttgcaatgaagttgcaatggcgcattttgaacgcgcaccgcgcaccaccgtaaacgcgcaggtgcgacaccgaaaaggctttcaagacaaacagcaagtgactgataagaagtaattatcaagcacattagaagaaagagggtaaaacgatggttcccgaactgaccaaagaacagaggattgccaaccttgaaaaggcaaagcagatgcgcaaggaacgcaccgagttgcgcagccagcttgcaagcggcgtgctgaccgtctgcgatctaatcaaccttgcagggcgtggcgacaaggcggcatctggtatgcgcgtgaaacagatgattagcgcccttccgggctacggcttcaagaagacgcaagcgcttatgcacgcgttgagcatcgccgacagcaagcgcgttggcggtcttggcgtgaagcaagcccacgcgctcattgaaaagctggacggggtggcgctatgagcctgaacacctgcaccatatccggcaatcttggcaaggccgctgaacttcggtacacgaacagtcaactagccatagtcacgttttcggtggccgtgaacgaacgcgcgaaacaggcggacggaagctatcaggacgtgccgcattggttcgattgcgtcatgttcggcaagcgtgccgaagccctgcaaccataccttgcaaagggcaccaagcttgcattggctgggcaccttcggcagaacaaatgggagaaggacgggcggcagtattcgcgcgttgaaatcatcgtggacgaagtggagttgatgaacacccgccgcgaagcccaagcgccggaagccatgccgccgcaagccgtggaagctgccagcgtctatgacagcgacataccgttttaggggcaatcaatgagccttgaagactgcgagaaccggggcgcggtgctggacggcaagaagtgcttttgcacaccttggaactgctggactaactgccttgaagtcgggcattgcgtctatgagaaatgccgcaagcccaagcaagcaacgctatttgacgaaagcgagattgaagaatgattggacgcaaaatgaacgtgagactttcggacggcgcggaactgccgcgctatgcgcatgagggtgacgcggggctagaccttcgcattacccatgacgtgacactagagccgggggcgcgtgctaccgttggcacgggtcttgcggttgagattccgcaagggtgcgtggggctggtgttcccgcgaagcggccttgcaagcaagcacggcatcacgctttcaaacagcgtgggcgtgattgattcgggctatcgtggcgagatcggcgcaacgctgctgaaccagtcggacgaaaccaccacgcttgatgcgggcacgcgcgtttgccagcttatcgttatgccgttcgttccgtgcgagttggtgccctgcgaagagttgaccgagacggagcgcggggcggctggcttcggcagcaccggcattgcgtaggtgaagcaatgagagcgcaagaatacttcgagggcatacgggaaaccgtcgttgaaattgagcgctcaaaggaaatgttggaacggctcaaagcttccgagggcgcgaaggttcagcgctacggtgagcagcagggcaacggcaacagcgatgcaatggacagggtaaaccggcgcattgagtttgagcagagattacaacgcagaatcaacgaagcatcggaaatgctggacgaagcaaccatgctgctttacggcgacgatgaccacggcggcttggcgaagcttaaaggcaaccgctacgccgacgtgctttgcatggcgtattgccaagggatgccatggaaggaagttgccgaggtcatgcgctgttcggtgaagtggtgccgtgaactgtcgggcgcggcgttcgcctatatcgacggcgtaggcttcgcgcacattcgcaccgcatgagaaattgacacttcccatcacttcccatgttgtgctaaagttcgctaaggtggttagaactatgcaaagcgtcacggacttagagccgtggcgctttttcttttggggtggtggcgcatggctaaaccgtttagtgacgcgttctatcattccaaggcttgggagcgtgcgcgggaagacgcgctaaagcgagatagctacttgtgccaacgctgccttgccggtggagagatcacaccggcaacgatggttcaccatatcgaagaactgacaccggccaacatcgacaacccggacattgcttgcggccttgataacttggtcagcctttgcgacctatgccacaagaaaacgcacgggtgggcgcgtgccggtgcgacccgtcaagggcttgcgtttgatgccgacggcaacttgatttgcctagccgaatgatcggcgcgacgagaaacgcaaaccaaagaaaaaattaccgaacacaaaacagcaggtcagggcggcgggcaatccccccggtttgaatctgcgcaacgattccttgggcaccaacgccgggagtcaatttctttcgcgtgccgacttttcaaaggggggtggtcttgtgcagaagcaaaaactatgcgatagttcgcaagtttcgggcgaagttggcaaaagtaagccgaagcgcaagcccgcttccatgcaatcgcgtgtcgaaagcgaggtgcgcaaccttcaacgcatcacgaaggacgcaataccagacgagaagcgcaaagttgtgttgccgatgctccacaacatcgcgtttctgaaagtcaagcttgacgaagcgcggcacgaactgctttatgaaagcatcttcaccgagtatgacaacggcggcggtcaatcgggcttgcgagagcatcccggcttttccgcttacaacaagctattcactacgtttcagcgtggcatcaagcagctttgcgatctgatgccgaccggcgcggcggctgctgatgcgctcacggattacctagctgaaacgcgctatgactaaggccgctaaggctgggcggtgcgagaaagctatacgtgaatacttcggcggcgtgcttgacgggtctataacggcgtgccgcaagatcaagcaggtagctgcaaagattctgcgcgacatggacaacaaagacccgctttatccgtaccatttccgcgaagagtacgcgagcaagcacgttaacttcattgagcgcttttgccgcctaccatccggcaagcttgggcacgctttcaagctggaattgttccaacttgccattctgtccgtgattttcggcttcgtagacgcagagggcttgcggcagtaccgtgaagtgctttgggtcatgggcaggaagaacggaaagaccgcgcttgcgtccggcatcgaaattgacttgcaggtgaacgatgacgagggcgcaccagaggtctacaacgtggcgaccgcccacgatcaggcagctaagggcttcaacaacgcttggcgcatgattaaaacgtccccggcgctgtcaaagcatatccgcaagcgcgtaagcgacctgtattgcgatttgaacatgggcaccatcaaggcgcttagcgcgaacacgaaccaccttgacggcttggacgtgtcgggcgcgatcattgacgagttggcggccatgcgaaaccgcgacttgtacgacctgaccatacaaggcacgtcggcgcgtaggcaaccgcttgtgttggagatcacaacaaacggcttcgtccgcgctggcatcttcgatgcgcaataccagtacgccgccaagtggcttgacggtcaggcaaccggcgttgacgcggagcgcttcattgcgttcatctacgaattggacgaacgcgacgaatgggagcatgaaccggcgtgggtcaaggccaatccgggcttaggcaccatcaaatcactgccagcgcttcgcaagaacgtgagcaaggcgaagaacgaccctacgtttctgccgacgctgcttgttaaggatttcaacctgattgagaaccaaagccaagcttggcttacgtggtcagagatacacaacgacgcgacctttgacccgtcggacggcttcacctacgcgattttgggcgttgacgcttcggacacaaccgacctgacggcggcgtgtctgctcatgcagcgcccgaacgacccgcacatatacgcgctgcacatggcgtggattccgcaacgtgcgctagagcaagcggagcgcgaggggcggcgcggcgggcgtgacggcgtgccatacgatgcgtggattgccaacggctacttgcgcacgtgcccaacgcccattattgataagcgcgtcgtgcttgattgggtggccgaggttcaacagaaatacggcatctatgccgttgcttgcggctatgacccgtggcatatgcgcgacgtgccgaccgtggaagcttacgaaggttacttcggcgctgactacttccggcgcgtcgtgcagggtgcgcaaaccctgtcaatgcccatgaaggaactacgggcgctttaccgggagaaccgaatagttgacaacgccaacccaattgcggagtggtgccgctcaaacgtggccgtcagatcggacgcgaacggcaacattgcgccggacaagaagaaccaagacccgcgcaaccgcattgacgcatgggcggcggagtgtgacgcgttcgtagtccttaaagacatggccgacgaataccaatcaatgatagggggctgaaaccttggcaagactgaaaccgcgcttgcgctcaatgttcgattccgtgtttcacggcaagcagatgcaagccgtaaacggctacttctcaacgttcacggcctaccaaccaagcttcaccacttggacgggcggcatttacgaagcggagttgacgcgatcaatcatcgagagcggcgcgaaccacgcaagcaagctgaaaccagaggtaagcggcaccgcgcagagccacgccacggcttcgctggcctaccagcccaacccgtggatgacaacgccgcagttcatcaagcgcatttacaccatgttgcaggtgaacgacacggcgttgattattccgctgttcgccgatgacaacacaacgcacgttggctattacccggtgttgccgagcaaatgcacggcctatgacgtgggcggcgaactttggttgaagcttgactttccgacttctgaaagcgtgtacgtggaatggtcacgcgtcggcgttatgacgcgccaccagtaccgaagtgaccttttcggcgacggcaccaacgtgcttaatccaactctagaactgatgcacgcgcagaccgaaggggaaatgaacgccattaagcaaggcgctttcatccgcttcataggcaagttgagccagaaccgcaacgacaaggacagggaacaggccgcaaaggacttcaacaagcagcttgacccgtccaacgcgggcggcatcgccgtgtatgaccgcatctttgacgatgtgaagcagattacgccgtcaagctacacggttgacgcggcgcagatggagcgcatcgagaagagcgcctataggttcttcggaaccaacgaagatgtggtgctgaacaaggcgaacgaggacacctataacgcgttctacgaagggaacattgagacgttcgccgttcagcttggctacgtgctaaccgcgatgacctacagcaggaacgagattgcccacggaaacgaaatcatgttttcggcaaaccgcttggagttcgccagcaacaccacgaagcttgccgtttcaacggcgcttttcgaccgtggaatctggaacggaaaccaagttgccgacgtgttccaatcgccgcactacgagggcggagagcgccacgtaatccgtggcgagtatatcgaccttgggttgattagcgagcatacggcagagcaagccgcgagcgccgcgcagaccaacgccaacattgcgctttcggagcagataggcgcaccaaaggacaagggacaagggggcaacgatgccaagcaagccgaatgaaagacagtaccgaacattgaccgccacgctcgcgccgctcaaacgcgcagacgagggcggcgaagagccgaagaagcgctttgacagtgattactacgtcgagggctacgcaagcacgttcaatgacccctaccccatctattgcgacttcgcgggcaacgagtatttggagatcatcagccccgatgctttccgcgaagccgatatgtcggacgtgattttgcagtacgaccacgaagggcgcgtgtacgcccgcacaagtaacggcacgctgcttatcgagccggacgaacacggcttgttcatcgccgccgacctgtcgcgcagccaagcatcgcgcgaactttacgaagagatagccgccggacttatcacgcgtatgtcatgggcgttcaccgtggccgctgacgagttcgacagggaaacccgcaccaccactattacgcgggtcaaaaaggttttcgacgtgtcggcggtgagccttccggctgaccccaacaccgagattagcgcacgcaacttgcttaacggagagattgagcagacgcgcaaggagtttgcgcggcggcgcatgacgcacgcgagggcgtgcgccgtaatggcaattgcaaacgcaagaaagaaaggctagaaccatggatgaactgttgaaggaactgcaagcgctgattgacaagtacgccgagggcacccccgagggcgtgaccgaggaagaggccaagcaggacgaagagcgcatggccgaacttacggcggagatcgagcgcaagaccaccgagcaggccgagcagcgcaagacccgcgccgccgctgtcgccgccgcccgttccgctatcgagagcggagccgcgccgaaggtttccaccgtgccgctggcacgcagcgcgagcgctgccggtgccgtcgtgcgcgacacgaccgactacgacgctgccgcgaagcgcggttggctcaaagacgttgcgacccgcgcgggcgtgcagcttggcggtggcaacgacatgacccctcaggagcgtgcggcgttcaccgcgcttaccaccaacaccgatgccgtcattccgaaggagattcaaggtcagatcatcagccttgttgacaattcggcggtgctgttcggcgacgttagccgcgacaacttcaagcatcagtatgagttggtgcgccacaccggcattgcgcagggcgatgcggcgaagaccaaagagggcgaagcgcccgccgacgagcagaacgaatttgacaccatcgcgcttgctggcgaagagatcaagaagaccgccaagctttcacgcaagatggccgttcagtctatggatggcttcgaagcatggcttatcaaagaggttgccgcccgcatcgcggttgcggctaacgcctttgtccatgaccgcctgactgatgcgaagcttggcattgccgccgcgaacctcattacgtgtgccaaggctggcacgctgaccaaggccgacattactaagatgttcgggcttctgaaaacctttggcaatcccgttccgaagggcgcaattgtttacgccaacaatgacaccatttggaactacattgccatggttgaggacaagaacggcaatagctacttcgttgacgagaagaccgaagaccccgccgtgcaaggccgcatcttcggaaagtacgttaagcaggacgatagcgtgcctgacggcgttatccgcgctggctatcccgatcttgtcaaaggcaacgtctttgacggcatcgacgttaccggctacgtcgccaccgacggcacgcagcgccattgcttcgatggctacctgctctatgattgcggccttgccgtcccgcagggcttcacgcagcttaccatcggcggcgcatccgcctaagtgatctaagggggtgccaccgatggcagacgaaaacaaagccgacattctggcggcttgccgtagcgccctgcgcatccctgccgattacaccggctatgacgaagagatagccgaccttgtgagcgccgcccgttccgcactggttgcgggcggcgtttccgacgctaaggccaacagcgacgatgacgcaagcgtgcgcgtcgccgtgaaaacctacgtcaaggctaacttcggcatggacaacccggacgctgacaggctcatgcgctcattcggcgaaatgctatgccgcatggccggaagcaccgagcatggcggcaaggccgaagcgggcgcgcaatgagtatgtgggctggcacgtgccagcttgccaccgagacgcagacgcgcgacaagcgcggcgttgtgtcaacttcgcttgcgttccgggacgttccgtgcaacgtctacagcatcagcgcggcagcttactacgccgccagcgcggcgggcatcaagccgcaagcggtaatcgagttgagggcgtgcgcctatcgcggcgaaacgctggtgaagttcaacggcgcgttgcttgccgttgagcgtgcggagcgttcgccggacaacgtgcggctaacgcttgttgagagggtgggcgaccgtgagcagggttagcaacgatattgaacgcgagattgccgccgccatgcgcgactgcataggcgaaaacgaagcggtgttggagcagagagccgccgacgctggaaaagcggcggttaagcgcctgaaagccgagagccgcaagcgttccggcaagtacgcgaagggctggactagcaccacagaccacgcaagcttggagcagggcgttgaagtgacggtgcataacaagcaataccagctaacgcacctgcttgaaaaaggccacaaggtcaagaaccagaccggcaagacctacggtgttgcgccgggtgacggcgttattgcagccgtggccgaagaggtggggcgcgagttcgcggcgggcggtgatgcgacgtgataacgcttgaccagctttgcggcgtgcttgacggtctgggcatcccttgggctaacgagggcttttcagacgatgacaagcccgccccgccctacatgagccttgaagcgggcttcggcgaaacggcctatgccgacaacgccgcttgggcgcgttggatgccctacgaaatcttgctttacaccgcgcagcgctcatatgaccttgaaagcaagattgccgacgcgctggacgcatccggctgcgcattcgagaaagcaataacacacctagacggcgaacggctcattgaagcgtcgttttccgtcaacgtaaccgagtagataggagccttgaaaatggcacgcaatggttttttcggcgttcgcaattctcactttgcgatctgcaccgacgaagacaagttcacctacgaaaagccggtgcatatggccggtaccgtcgaaatcagcatggaaccgagcgttgagacgggcaccagccatgcggacaacgaagtttggttggaagagcagcaggacaacggcggcagcggcacaatgagtttctacgacaccgagggcacgccggagaaccggcagcttatcgccgatctggtgggctacacgattgccgaggacgggcgcaccatccttagcgcgaacaagaagcccaagaagtttgcgtttatgtgcgagcagcccggccacgttctagggcgccgccgctgtctgctgatgtgccagctttccaagccgtcgcagacgctcaccaccaacagcgacacgccggagatcacgcagcttgactatccctttacgtggaagcccattgttccccccggcggcaacgccgatgaccgcacgagcggctatgacagcttcacgggtcttgcggactatgacacgttcttcgatgccgtcaaccttgacgggctgctagagaagaagcccggtacgggagacgaccccgcgcagagtgaagacgggggcgagtaatggttatcgacttcggcgaagggatggagtttgaagccacgttcaacggcttcacgcccattgtgttttcgcgcacgttcagcgttgagaagcccaacggagcgacgcgccccaaggacattaacgaagacgtgggcatgatcgttgaaacgatgcagtcttgcggtatgccgtctatgacggcgcttcttgaaatcgcctatgcgtgcatcaagaccgcgaagccgcgttgggggcttggctttgacaagtgggtgaaatcgcttccgcccgccgcgttcgacctacagaagggggacggttgggcggctgatgtgatgggcattgtcgaggacaacttttttccttcaacgcccgatggagtggaagccgcgcccgccgaagcggccagcgccgccactgcctagcaatctgtcagacgcgtgcgacgctcgctatctgtacgactgtcagcaatgcggtctttctatcaccgatttgcagcaacttagcttccggcaggtcaaagacctgttggagattcacgcgttctacgccgatgccgccgccaactacgacgatgacgaaaaggcgcgtaaggcagaagcggcattttggggctagtgaacgtttcacggcaccgcacccaagcgggcgcggtgtttgaagcgctcatgcactttgagaattgaaagaaggtgaaccggcatggcggtaagctacaaagggcttgttatcaagttcggcggcgacactaccgaacttcaaggggctttgaagaaggtttctagcgaatccaagaagacccaagcggatttgaaggaaattaacaagtctttgaagttcaaccccggcaacaccgacttgctgcaacaaaaggtcaaggcgcttaacagcgcctatggcgagacgcaacagaagttggacgcgtacaaacaggcgcttgcgcaacttgaagcgaagcagcagagcggcgctaggctgaccgccgaagaggaacgacaatacgacagccttaaacgcgcaatcctgcaatgcgaaaaccagcttgaatcatacggcaaggaacttgccgaaacatcacgcgaagccgaagcgtcgaaaaccaagctatacaagttcggccagaccatcgaagacaacgccgacaagctggaaaaggcaggaaagggcgttgagcgcggcggtcttgctatttccggcggcatcacggcggcggcaaccggcctgaccgcccttgcggaaagccaggaagaagccatagcgaagaataatcagcttgaaaccgctttcaccagcgccggaagcaccgttgagcaagcgcagaccacctatgcgaacttctaccgcatcttgggcgacggcgacaccgccaccgaagcgagccagaacctaatcaggctcacgcaagacgaagaggaattgaagaagtggactgacattgcagccggtgcctatgcgacgttcggcgacgctctgccgttggagaacttggcagagacggcgcaggaaactgcacataccggtgcggtaaccggcagtttcgccgatgcgctcaactggtcaacggcgagcgccgagcagtggagcaatgcgctgtccggcaactctgccgcgcaagaggcgttcaacaaggccattgcagagggtcagaccaaagaagacgcttttaacgaagcgctggcggcatgcaagaccgagcaggaacgagcgacccttgtaacggacgctttggcgggcgtttacggggatgctggcaaggcgtttcaggaaaccaacaaagacttgctagcaagccgcgacgcgcaaaacgaactagaaacgtccatgcgcgaaatgggcgaagcagcattgccggtaaagcagatggtaaccgagatcggcagcgagattctaggcaagctgacaccggcgcttcaagccgcgtcggattggttcaaatcgctttcgccggagcagcaggaactagtcaagaaccttgggttgggcgtgctggcgttcggcggggttactaccgccgttggcaagttcatgcagagcgccgcgcccatcggcggcgcgatcaagagcattgcgggcggcttcgttgaccttggcggaaaggccgacggtctgggcggtaagttcggcggccttggcggcggctggaagagcctaaccgggcttatcaccgctaaccctatcggccttggcatcgctgcggtaagcgcagcggtagccggtcttacatggttctttacgcagaccgagacgggcaagcagatgtgggctgacttcaccggctggatttcggagaagtggcagggcgtttgcgacttccttagcggtgccggtgagttctggggcggtgtatgggataccgtgacaagcggcgttgagcagtttaaaagcgacgttgcgagcaaatgggaagggttcaagcaagacgcaagcaacgcttgggagaacatcaaaagcaccgtttccgaaaaggcacagggggcggctgattgggtttccgacaagtggaacactctacagaccgccacgcaaacgtacttcggcggcatcgcttccactgtgcaaaacgacatgaacacagcaaagcaggtgggcagcagcgcgggcagcgccctgcaagccgccctgtccggcgactggtcaacagcaaaggccgaagccgccaacgcctttaacgcgatcagggacaacatcagccagaagatggacaacgcgcagcaaaacgccgtgcgcgtcgccgatgccataggcaacaagcttggctttccgggcttgggcgagaaggtcaacggcgtgttcaacagcgtgcgcgacttcatgaagaaccccattgaaaacgcgtggaactggattaaggacattccgaacaagatcatgaacgcctttggcggcatcaagattgagttaccgaaaatcaagatgccgcacttcaacgtttcttggaacgacataggcggcatcgtgaagctgcctagcatttccgttgactggtacgcgaagggcggctatttcgacaaagcttcgatcatcggcgttggcgaagctggcggcgagtacgtggcaccagaaaagcagctatgggacttcatagaacgtgcggttaacaacgcgttcaacggcggacagcccgcgcagcaaatcgccgtcagcgtagaggtaaacgcgacggttgcgggcaacgcggacgcgtaccagacaggccagcaaatcggccttgggattgcaagcaagctaaagcaaaggggtgtgagcgttgcaacgtaggatgaagcgggcgcagacagaccgcgttatattcaacgggcacgatctaagcgccctagtaagctgtaaggtcaaccggccaatcatggcacctgtaaacgcgaacttcgagaacgtttcaggccgtcacggggagttgttcaaatcggcctacttcgggggctatgacctgccggttgacatttggctaagaagcgatgacaggcgcgacgcggcgacggttcggcatgcgctggcggaactgctatgcaccgacgaacccgcgccgctggtgctgccggatgaccccacgcgctaccttttggcaatcgtgagcgggtcaacagacttgggcgagatcacggacgcttgcccaagcacaacggttacgtttcacgtcggcgacccgttctattacggcaacaagcgccgcgttgaggtcaaggcgggaacgttcacggtgaacgcgggcggcaaccgtcccgcgcatctggcaatcaccgccaatccgtcttcaagcgcggcttggtatatcaggaacgttgacacgggcgagcaagtaaagcttgcgtcgagcgtcacaagcacaagcaccgtgcgcgttgacatggcgctagagcgagcgaccgtcaacagccaagccgccgccgtcacgctcgattcggatttcttcacgatcaatggccgcacgaccctgcaactaagcggcggaagcgcggtgctggaatggcgggaacgatggctttaatcagaaaagttggcttcacgcgcttttcgcgctggggcgtgaaccttgggcggctggacgttacggcggcgacgcacaccgaagcgctggacggcaccgacgaaatcaaggtgacgtgttccgatgacgtgaacaagggtgactatatcgtttgggttgacgcgcagggcaagacccatgaacacattgttgacgatgcgagtcgcacccacggcgaagacggcaccttgcaaaccgagttcacgggcgttaactcaattgccgaactttgggacgattggacggacgatgtaaggccgtcggggcaggttgcgacggctcttgcccgcgtgcttacgggcacgcgctggacggtgggcacgtgcgacgtgaccgcaagcgcgagcgtcgttctgtaccaccagagcgcccgcgaatccgtggcagagattttggaagcgtggggcggcgagttggaaaccaccatagaaaccaacggttcttctgtggtttctcgcaaagtgggcgtgcgcaagctgcgcggcaaccagtcaagcccaaagcgcttcacgtggacgaaggacattaagaccatcacgcgcacggtgtcagccgacaacccgaaaacgcgcgtctacggctacggcaagggcgttgaaaccgattcgggcgcttacggcagacgcttgaccttcgaatctgtcaacggcggcaaagcctacgtcgaggatgccgccgcaacgaagatttgggggcacccggacgcacgcggcacggcgcttccggcttgcacaagctacgtgaacgagcagtgcgaggatgccgcgcagcttctaaaggaaacgaaagcgtaccttgcagaggtcagcgaaccgaaggttagctatgaagcaagcgtgcttgacctgtacgcgttcgggcgaagctgggaaggcgtggcggtgggtgaccgcgtggcaatcatcgacaagggctttaccgaagagggcataaggcttaccgggcgcgtttcgcagatcgaacgcgacttgctgggcggcgacgctaccgttactttcggcaacctcattaacagcatggccgatatgtggcagagcgtgagccagaccctaaagaacagcagccgcgcggcggcgacctatgacgcggtggcgggcacgtcggttagctggcttgtgcagcttcaagacgcgcttaacgatcagttcaacgcggttgggacatacaagcttgaaacctttgaacttggcagcttgtacagcaacgtgccattgaaccccgaaaccggcttgccgctcaaaagcgtgtctggtatgtggtgcgtgaacatttccgggcgcggcatccgccttgcttcgagccttacgagcagcgggcaatggaactggaagacgtttataaccggcgcgagcgtgacagccgattgcatcaacgccgggacgatgcgagccgaccgcatacgcgcggggcttctgacggacaacctagggcgcagcacatgggatttgaccaacggaacgttgaagacaaactacatgaccgctaacaacatcaccgcaaacggccagttctcatgcggctacgcgtcaaaccttttgcagcttatcgccggtgagattcgggggcttgaaaacggcacgcagattggcgtaatcgacttttcggcgcacttccgaaacattcagaccggcgagcagtacaccggcttgcagcttctgggcaaccacggcataaggatttcgaccccgcaaatatccgtggcagaaagcggagacagaagcgttgttgcgaccatctgcaaatcaggcaccatgcaacagccaatcgtcaccgaggttcacagcaacggcaacggttgcgttagctggcattacggaacattcaagatcaacttttctgacgggctttgcacgtcttgtgtaactgtcggcacaggttagggggcttcaattggacaaaccagttatgtacatggcgcatgacgctttgagcaacaccgaaatgcaggtgtcggagttcgacccggcgttgctcgccgcagcggaagcgcagggcgttatcttcgtcgcggttgacgcggcgggcgaccgccaaattgtgagggcgtgcgatgtgacaccgccaagcggcgttgaaggttcgttcacgctggttgaacccgtctacgttgatgaccgcatggaagcggtgctagacgtgttcgacgctatggccgcgctcatactgcccgaatccgccacgctgtcggcatcagagggcgcgaccgcgccgccgcgcgaccccatagaggttttcggcgagaagcttacagccctgcgcgagatcaccaaggcaggtgagagcagatgaacacgcacacccttgaactagaccttagcaaggacggcttgggcgctggccttgtgagggtcggacagggcgacaagcacggaacgaccatcaaggcgcttatctacgacggcggcgcggaagccgcgctaacggggttcacggcctaccttgaagtgctgttgccgaacaagcgaaactactaccgagcagccgccgcgatttcgggcaacgccgccacggtgaccgtggacgaaaacaagctttgcagtgtcgccggttacaccgacgaagcctatttcgcgttcgagaaagacggcgtgcgctactcaacggagcgcttcgcaatcgagattttgcgatgcgtcaccgaggggcagaagcccgcgcaaagctgggatgacgctatagacaacctcatttcgcgcggcaacgcagcggtcagcgccgcgaacacggcagcgggcgcggccaacaccgccgccgatgcggccaacaaggcagccgcccgcgttgaaacggcggtgagcagcgcggcgagcgcggcgagcgcggccacaagcgcagcccaagccgccaacagcgcagccacggcggcgaacaccgccacgggcgcggccaacagcgcggcgcaagcagccaccagcgcggcaagtgccgcgaactacgcggcaggagccgccaacaccgccgcaaaccgcgcgaaccaagcagcggacagggtggacaaggcaatagcggacgcggaagcggccacgaatggcgcgaaccaagcggcggaaaaggccaacggttcagcagacaaggcagacaaggcggctgctgacgctcacacggcggcagacgatgcccgcgaagccacaaaacgggcgcttagcgtcattggcagcgggacgggtggcggcgcttcgtccggcggcggcgctgacagcgccgaggttgagaagcttaaagaggatgcggccacgctcgcaaccgcgcttgtcgatctgaccgacgattacatagttatttacaacaccgttttcacgcccgcaagccgcgttatctcaacggacggcggaaccatcgaacttgaccgggcaagctacgaaaacgggattatcacacttgaataggggtgcatgacatggctaacgcagcagaagcattcagaatcaaaggcgaactttacggggtcgttgacgatacggcacgcgagacggcaagcgccgcgacggtgcttgaagagttcgaccggcaaaagagcattgggcagtatccggggcgctcgctcgctgacgcgttcgcggcggagattgcagcgaagggcgatatttacgcgtggcttcattcgcgcgtgcaggacgctgacttttcgggcttgcgcatcggcgattacatggacgtgcccgttgccgctggctccaacgttcccgcgcagacggtgcgctatcttctggcggctgttgacccgtactatcagtgttcagattcgccgatgccgcaccaccttgcgttcgtgcccgccgcgccggttcttgtgagcggcagcaaggccaccaacacaagctatatcatgtggaacaccacggccaccaataacggaaacgccactgtcaaagaaccctaccttgccagccaccttcacggttgggagatcagcgactatctgccagcccttccggcggcgcttcgcaacgtgcttatcaaccaccgttcgttgtgtgaacagcgctacggctcttctgcgctgaccgaagcgagcgggtggggctgggctgaccttggtaaagtgtggtcgttgtcagaaatggaagtttacgggtgcgccgtatggggttcaaagggctattcggtgggcatggattgccatttcccgctgttcgacagcacggcaagccgcatcatgggcgagcgcgtcatttggtggcttcgttccgtcatgggcggttcggcttccaacgtgtgccgtgtctccagcaccggcactgccgacaactattcggccgcgaatggggggggtggggtcgcccgcgcccgtgcttcctcataggctgacaagccgttgcatgacgctatgcccgcgcccgccttgcgcgggcgcactggaaaggcaagctaatgagtaccgtactggaacgctaccgcgatttaagcaacttcgagtatttcaccaccgcaactagggtgcgcaaggagataacggcgcttgtgacttcggcggcaatgccgaagtcataccgcttcgttctggccgtgcctatggcagagacggcaagaagccttgtaagcaaccttgtgacggcaaacgcgttctaccccaacaccgaacacaacgtgacgcagcggcggcattacatgacgcttgccgttgccaactgcgaacagctgttgcaagacctacaatgcctgattgatcttggcatcatcaaggttagccggtgcgtgcgcatcgccgatgatgtggaaacggcggcgaagctcataaagggcgcaagaaagggtgtgaaactcattgggcagcggtaaaatagcgtcgcgttgtgccttgtttagcgcgtcaattggtggcttcgttccgtcatgggcggttcggcttccaacgtgtgcaatgtcaacagcaacggcaatgccaacaacaattcggccacgaatggttggattcgcccgcgcccgtgattcctttgcactgccagtcattgcggacacgtccgcaatccgtgcgcaagaggaaggaaggtacaacgttcggccacatggccgtaaatatgcaccccgcaggtaccgcagaccgctgcttgcatggcgcaggtttcggcattcgcttgcgtttcattgccggtgcctaagcggctattggatgccgattgcaagccgtgcggggtgcccatgaaatccgaggagcggcgggcggcaaggcgtgcccgccgcgatgccaagcgggcggcgaaccgcgccaagcgcattgaatcatgcacgcttgaagaggtggccgacattgacaacctttacaggtgcgcccgcgactgcgcccacggcgtggcgtggaagtctgccgttcaacgctaccttgcaaacatccttccgaacgtcctaaagacgcacgccgacttgatggcgggcaaggacattcggcgcggcttcgttgagtttgacatattcgagcggggcaagcttcggcatatcacgtccgtgcattactctgaacgcgtcgtgcataaggcgcttaaccgctacgcgctggcaccggcgatctggccgacgctcgcgccgggttgcaccgccaacatcaaggggcgcggaaccgactttgccgtatcgcgcctgaaacagcagcttgcacggcactaccagaagcacggcgcagaaggttacgtgctgcttgtcgatttctctaacttcttcgggaacatcgaccatgcggccaccaagcggctaattgacagggcgctagatgacgagcgaatcaaggcgcttatgtacgcgcaagttgattcccacggcacccgtggccttgggcttggcagcgagccgaaccagatactagccgttgcccttccaagccccgtagaccatatgttgctgcgcacgccttgcgtgctggcaagtgggcgctacatggatgacctttattgcatcgcccttgacaaggcggacttacgcggcgtgcttgccgacattcggcgcgagtgcgcgaagcttggcattgtcgttaacgagaagaaaacccgaatcgtgaagctgacgcgcggtttcacgttcctaaagaagaggttcaactatggcgagactggcaaagtcattgtgcgcccgtgccgttccgccgtaacgcgggagcggcgcaagctgaaaaagcttgcggcgttcgtggagcgcggcgagatgacgcgcgatcaggcgttgcaaagctatcaatcttggcgcggttcgatgatgcgccttgacgcgcggcgaaccgtcgcgaacatggatgcgctgtttacccggcttttcggatagcagcacaaacacaccaacagcaagccaagcccgccattgtgcgggctttcctattgttagggggcaaaacatggcattcacagccgaagaggaagccgcattgcgcggcatcatcgcaatttacaagacgcaagcgccgtcattgtccgatgacgtggcagagattgccccagcgctctacgaccagtggacgggcgacggccactattacaccgccggtgagcgcgtggagcatggcggcacgctctatgtgtgcttgcagccgcacacgtcgcaagcggactggacaccagcagccgcgccgagcctttgggcgcgtaaccttgccgcagccgacagcccggacgcaacggatgtgcccgcatgggagcagccggacgctacgaacggatacccaaccggcgcggtggtgacccacggcggcagcaagtggcaatcgcttgttgacaacaacgtttgggagccgggggcggctggaactgaaacgctttggcaggtggtggacgaatgattagcgccgccaccgaacagcttataacgtcaatcgttgggctgctggccagcggcgttataggcttccttatcgcgcaagttaagaacctgaccaagtaccagcgggcgcggctgattatcgacaaagcatcagcgcgagagcatatcaaaaccgcctatcaaaagtacgtcatagacggcaagaaaatgagcatttcgacctatgacgaactgctagaggaatacgaagcatacaagcttctaggcggcaatggcactggtgagcgttacatgaacgagattaaggcactaaagccttatctaataatcgactaagggggacattatgaacgatctgaaaatcaactttcttgcacgtgcaaagaacaagctgttttggatggcgctaatccctgcgctgttcctgctggtgcagatggtggccgctattttcggcttcaatttcgacttgtcggaactgcaaggccgagtggttgccgccgttgatgcgctgtttgccgtgctggtaatccttggcgtggtggttgacccgaccaccgagggtttgtgcgacagtgaacaggcgatgacctacaccgaacccaagaaagccacccatggaagcgagtaaacggacgtggcgcgagattctggcgtttgcgtgcggggcactcatggctatagttgtctgcttcgcgctcatggttgcctacgcaagcgaccagccgcgcgaagcggcagcgcccgaaatcgtttttgcggttgatgaacccacgtacaagcctatacctgcgggcactcatatgccgctctaccttcaagatgatgtgcagtggtcacatatcggatacgcgggcggcaccatcggtgacagcgggtgcgggcttgtctgcgccgcaatggctatcaagtacataacgacacaggacgttacgccgctcaccgttgcgggcgctgtcggcaccgcgtgtctgactgacggcgtaaacgacatggagaagttcgcgcagtggattgccgcgacctatgagccatacggcattacgcacacaggcaagatttacagtttgcaatcagcgcttgccaaggttgacgctggcgcggtctgctttgctggcgtgcgcggtgcgttcggcgataccgaatacagcagccacgttataacgatctggcggcacgatgaaaacggtatgtggtgggttcgcgacccggcaagccccgtcaattccgcgcggccatggacgcttgaagaacttcaaacggcaaaccttttctatttcgtatgcttggaaggtggtttctatggcactacagggcattgacattagcaattggcagaagggcatcaatcttgatgcccttgccattgattttgcgatctgcaaagcgacgcagggcgcaagctacgtttcgccggattgtgaccggcaaatgcaacaggcgatgaaacgcgggcttctggttggcgtttaccactacgttaacggcgctggcgttgacgcggaagcgcagcacttcgccaacagcattaaaggctaccttggcaaagcgcttatcgtgcttgactgggagcagggcgacaatgccgcgtggggcaacaccggctatcttgattcgctggttgcgaaggtaaaggcgcttaccggcgtaacgcctttgatctacgcaagccaaagcgtcttcccttgggatattgccaagaagcacggttgcggcacgtgggttgcgcaatacgccaacaacaacacgaccgggcttcaaggcaacccatggaacgagggcgcatattcatgcgacattcgccaatactctagttgcgggcgcttggacggctggggcggcaaccttgacttgaacaaagcctatatggacgcggcgaaatggcagcagttcgcagccgtcggcggcgcggcgcagccagcgccaacaccgaccgcgccagcaaccggcgttgagaacatggacgcgctagaccttgtggccggggtgttccgcgacgaatacggcaaggacgatgaccggcgcaaggcgcttggctcacgctatgacgaggtgcaaaagatcgtcaaccacatttgcagcgcttcggctgaaaccttggcgcaagagacgtgggctggcgattaccgcaacggttcagagcgaaaagcgatcttggcgcaccgctatgatgaagtcatggcgattatcaacggcaacgttgaaagcggccagacgtacaccgtcaaatctggtgacacgctttcaggcattgcggccaagttcggcacgacttatcagaagattgccgccaaaaacggcatcacgaacccgaatatcatctatccgggtcaacggctcaaaatctgacgttaaaacggggcaccctgataaggggtgccccgttttcgtgcgttacagggcaaatacgcaagccgcctatctggtattttgcaggttgcctatgaccgcaaaccaattgcggttaatctgcaaataacaggtttcaaggcttataaccgtgttcgccttagttatactaggctccaccatgaaattcagacagccggccaatgagccggctgttttgctgttgtgacccgtgtccttgtgcggaacctgcgatgcccgccgtgtatcgattccccagttcgtcatgcgtggtaagatacgcactgcgattgaccgaaaagcgaacacaggattgaagatgaatcggctcgaagcattgcgaattctcggtctcgacgaagacgcaaccattgacgacatcaaaaccgcatacaaggaaaccgcgcagatcctgcatccggaccgctttgccacgaacaagaagcttcaggagcgggcaaccgagcagtttaagaacttgcaggaagcctacgagtatttgacgagcggcaaaggatcgaaggcgacccgcgccgcaggttcgtcgagctcccagcgcagcgccggctattcgacggccagtcagctcgaagctcgtcttgcaggcatcgcggcggcgcgtacgcagttggtggcacagcgcgatgtggtgctcgacgagcgccgcaacggtatgcttatggctgggatcggtgcgatcgtcgcgctgttcacggggcgcaggccgttcgggttgttcggaatcgtggcggccatcgcttccgcagcgacggtttggggtatcgtttcgattgtatccgcacagcggacgctttctaatctcgattctcatattcaggagctcaacgccgagcagcggcgcatctccgacgaactcgacgatctgtgatcggcgacaagcattcagaagaaacagaaagaagcagtatgaaacaagaaaacatccgcaacgtcgcgatcatcgcgcacgtcgaccacggcaagaccacgctggtcgaccgccttctctacacagggggggtgtttcgcgaaaaccagcaggtggaagagcgcgtgctcgactccaacgatcaggaacgcgagcgcggcatcaccatcctgtcgaagaacatttccgttcgctacaaggatgtgaagatcaacgtcatcgacacgccgggccatgccgacttcggcggcgaggtggagcgcgtcctcaacatggccgatggagcgctgctcatcgtcgacgcgttcgaaggtcccatgccccagacgcgtttcgtgcttcgccatgcgctgagccttggtttgcgcatcgtgctcgtgatcaacaagatcgaccgaccgggagcgcgccccgaagaggttgtcgatgaggtattcgaccttatggtcgagctcgaggcatccgacgagcagctcgatttccccatcatttacgcgagcgcggtgaacgggtatgcgcgctatgctcccgaagacgataacatgaacatgatccccctcttggaaacgatcctcaaggaggttcccgcgcccgattgcgaaccgaacggtccggtagccctgcaaatctgcactgtcgatcattcgagtttcgtcggccgcatcggcgtcggccgcctgttctcgggcaccattcacaaaaacgaaccggtgcttgtcatcaagaatgacgggacccgctataacaccgccatcaaagaagtgttcacattcgaagagcttggaaagaaaaagcagctcgaagttcatgccggcgatatcgtagccgtcgtaggcgtcgacgatgccgacatcggcgatatggtgacgagccgcgatcatccggttcgacttgatccgatcgaagtggaagagcctacaatggctgtcgttttcgaggcgtcgacgagcccgcttgtgggccgcgagggcgagattgtgggagcccgccagctgaaagagcgcctgatgcgcgaatccgagagcaacatttcgatgcgcatcgcggagcttgaagacaaaacgggcgtcgaggttgccggtcgcggcgttcttcatctttcggtccttatggaaaccatgcgccgcgaagggttcgagttccaagtcggacgtccgcgcgtgctcatcaagaaggacgagagcggaaagaaaatggagcccatcgaagaggcaacggtcgatacgccgagcgagtacgccggaaaggtgatcgaagtgttcggcagcgccggcggcgagatggccgacatgttccaacgcggcgaccagacccatctcgttttcaagattcccacgcggggaacgatgggcttgcgcacgcgcctgctcaacgcgacgcgcggcgaggccaacatgttccaccatttctccgagtacggtccgtatcgcggtgatttcaacggacgcaagaacggctcgatgatatcgatgtcgaccgacaagagcgtcgcttacgcgctcgatacgctgcaggagcgcgggcgcctgttcgttgggccgggtgaagattgctacgagggaatgattgtggggcaatcagccaaggaaggcgatatggtcgtcaacatcgccaagagcaagcagcttggcaatcagcgctcgtcgggcgccgataaggcgatccagctgaccccgccgatgacgttcacgcttgaagaagcgctcgagtacatcgaagacgacgagcttgtcgaggtaacgccgaagagcatccgccttcgcaagcgcattctctcggcggtcgagcgcaagaaggcgaacaagaactagcggttttaatgcggattagggcagggctcgggtttccctgggtcctgtctttgttagatccgtccttgcgacggtcttttttcggcattccgattttgcgaagagagatatccgttcgcgtagaaaaaggagctcaatactccatatggggtatcttgggcttcattctcgtattgcggagtttttcaacaacatgcgcggccataggggaaagccgaatctccgaacaggtgaaaccgtgcatctaaaaggcgaaacgcttctcaaaaaagttaccaaagagattacatatataggtggtatgagaagtgaagatgggcttcttgtgcagggctttagcgcgataacggcgctgtgcgaaaatagcgattactgtataagaatccatgctgatgggcatgtacgagggaaggtactatgaaagcatctagattagccaggttcgtgtgcgcggcgggcatcgtttccgcgtgcgtcgttggccttgccggttgttcggagaattccaacccgagcggtttgaccggtggcaccgctgccacgatcaacggagtcgagattcccgaagacaccgttaccaattatgtccaatcgttcagagccacctacggaatggacactgaggactcatggggcgagtggctcgccgaaaacagcatgacgcccgaatcggtccgcgaagaagtcatcaactactacgtaagccaagagcttgtgaagcagggcgctcaggaaaacggcgcggaagtagacagtgcgaaagtcgatgagaccatcgcgaaaatgaaggcgaactacgattccgaagaagcatggcaggaagccttgaccaaggcgaacacgacagaagaagcctatcgtgaatccgttgtgctctcccttaccgaagcatcgctgaaagaagcggtcggcaagggcgaagcgcctaccgatgaggaactgctcgagtactgtgccatgtacgacggctcgcgccgctcttcgcatattctcttcaacagcgaagacgaggcaaccgctcaagaagtgctcgacaagatcaatagcggcgaactcgatttcgtcgatgccgtgaaggaatattcgcaggatgccggtaccgccgaaaacgatggcgatgtgggttgggacaatctcctttctctcgacaccgactacaagactgcactgggagaactcgataaagaccagataagcggattggttgaaagccaattcgggtggcatatcatcaagtgcaccgacctcttcgaggttcccgagggcggcttgacgagcaccgatcaggttcccaccgagattctcgagagcgtgcgcacgagcttgcagagccagaaggattccgaggcgttcagcaactggtatacggagtacaaggaaagcgccgatcttgtgatcaacgagatgccttcgaacgttccctacaacgtggacatgtcgaagtaccagaccgaggattcttccgacgatgcggcaaccgacggttcgactgacgggaatgccgatggagccggtaacgcagccaacggcacggatgctgccgatggaaccgatggcgatgcgtcgaacggcgatggcaccaacgcttccgatgccgctgatggccagacgtcgggcggaaccgatgacggtgccgatggggcctcggcagacgaagggtcggccgacgagggcgcatcgaacaatcagcagcccgccgaagcggcatagcttcgaaccaggctgtttttttgaacaccgccccggactatacggatccaacgcaaccgcttctgcaattcgcagaggcggttgttgttcgttcggggacaccgattctctcaattgattcgttcgtactgcatgagcgagaaaacatcgccgtgctcggcccgaacggatcgggtaaatcgacgttcatcaagctcatcacccgcgaggtgttcccgctgcatcgagatgatcccccggttttgtttcacggcagcgagcgcgtgctgctcaccgaggtgaaaaagtgcatcggcgtggtttcttcgacgatgcaagaccagatcacggctcatatatccgtcgaagacgtcgttttaggcgggctgttcggaacgttgggcgtgcttccgcattttcaagtgctcgaagattcgaaagaacaagcgctcagggcgatgagccttatgggagtccaggaccttgctccgcgcgatatgaaaacgctttcgaccgggcaagcgcgccgcgttctgttcgctcgcgcactcgtgcacgatcccgacgtgcttgtgctcgacgaaccctgcacgggtctcgaccccgagggcatgttccatataagggaaagcatgcgtcatcttgcgcaggcgggcaagtcgatcgtgctcgttacccactatccggaagacgtcattccggaaatcatgcgggttgttctgctgaaagaaggaagagtgttcgccgatggcttgaaagacgagctgctgtcaagcgagacgatgacggcgttgttcgaggtacctttgcagattcagcggaggcggggatattattcgcttgtgagcgaatactagctgatgtatactacgtatccgctgttgctttttggctttgagggtcatgcggcggcggaaacgtataagtggagagatgaccgagctggccgaaggtgcacgattggaaatcgtgtgtgcgccaaaagcgtacctagggttcgaatccctatctctccgccagctgaacaccgcgcttcggcgcgtgatcatagggcgctattgcccgagggcagcggaaacggtgcctggcggatttaccggcttgccggcgatccgccgaagccttgaaggtcggctctgaaaaccgaggcggcctgccccaagcggaggggtggcagagtggttgaatgcggcggtctcgaaaaccgtttcaccggcaaccccggtgacgagggttcgaatccctcctcctccgccagtttttattagatgaagcgcctccggcgctttttagccgatttgttaaagctgctttaacaaatcgatatgacggtcttaatgcggtatatgtagtgttgcaagtctttcattgtgacctctcttgttgatttgagagttaagactagcttttatctacccttaacgtcttcaactcctcgttctcagccaccaactgcagagcagcctttcctttgtcgctcacctgtgaatgcggatcaagtgtgatcccgtacccgctgcgcgtgatagaatcgatatatcgttacctgcgcgttctcctgtgtccaccatcgcgaacattttgagcatggtggtgttgcgcgggtcagatttgcctggcttcattgcctcttcgatcgggatgcggaagtcgccggtggttctcgatgatcagggagtcgtctcttcatacgcagacgatgccctgcctttcgtggtaattggcgttcttgatacagttgacgagcgcctcgcgaagcgcttcgtgggccgaggtgtcgtctaccctatcgatgctgtccagcttgagcgggtcttgagggcagccttcattttattgtacgccctgaaacagaagtcgtatacattgcccgatcagtctccggtgttcgatgtgaatcaccgagcattttgtgggttttgcgcacgtcgatgatttcgagttgtatatcgacatgtgttgacaggagaaacgtgacgaagacatgcagattgctcacgaatagacattaaattatgagtaaaatgaatctagtgtagaaatgcttttatcagttcctgcgaaagctgtttttgatttgatcttcgagggagatgcatggagtacgttgattctgcttggatgcaatggtattgcgctcaacatactgaacgctgccttcgtttttctggcgagagttttgaaaaatatgtaacaagcctgcttgcgtgttatcaccgagattttgtaaatcctgatcccatgggcagtcatggtgatgaaggatgcgatggtcttgctgaaggcggtactatcctttatgcatgttatggcgctcgagccaaaacaaaggtagaccagaaagttagtgaaaagatcgtaagtgattttacgcgcgggttgagttgttgggattcttttttcacttggattttcataacgaacagtaacgtagggccaaaaggaacagcatgtttcgctgacttgcagagagagcacggcgaggacaaagttcgccccatcaaaatggaattgtggcgtgctcccgaagatctttggaggaaggttggaaacaggctctcacctgatgacctggattgcctgtttccgggtgttccccattcccagaatgtagagctcgacgatctagtcgacctcatccattctctcgaatgcgtggaaatatctgcgtccgaagcatctttggatataaagcctgtaccccgaacaaaaatggattacaacgacattcccgattcaacgaggattgaatttaatgaaggaagaattcttgcgccgaggatcgagcaatggtttgctctgcaagcagatccttatcttcgggatgcgaaggcgcaggcctttaataaaatttactcgaaagcggcagaagcgggtggcgatgcaaaagaaatagtcgagcgaatgtatatcgcagtgggaggctccgactttcgattgaacacaaaaagggccaatgctgtttatgccttaacagcctacttctttgactcatgtgatatcttcgaagagccaccgaaagactataggaaaggagaaaccgacgatggttttgccgacgaaggggattagcccggatcgcgcgctgcttacaataggtgcttcggccttggtcttgttggattctccttccacggtaaccgccctgtgggaaaggtatacatcgtcatctgcaaacctcgaccaggacgagatggtcaccttcgattggtttgctttggctttgtctatgttgttcgcaataggtgcaatcgactggaacgaagacggcagattggagaagcgagatgctgctgcgtaaggtcggatcgaatgacgaccgcttcaaagaactgacgtttcataccggactaaacctattggtggccgacaaaaccgacaaatcggaattaggggatagcagaaacggagcgggaaaatcaagcttcgtgcgtattcttcgatacctatttgggggctcacttgataaatgcttattgcgccgtttttgctacaccgttccacgctccactgctacagcgttccatggcagactgccacgtagcaatgcgggttgctctgattgcgaggggcgcgcaagcgcccctcttggccaatacggccggttatgctcttagccgatgcgcttgcgcattgactcgtcgccttcaatatggatgacgtccgaccgatagactatgcggtcgatgacggcatctgcgattgctccttccccgagctttgaatgccagcctgctggcgagaactgcgagcaaatcaataaggacccgctgcgcaagcgcgcctcgactatctctaaaagctcgcgcgccgccttcccctcgagcttttccaaaagccaatcgtccagtatcagcaagtcgcatttcgtgtagcgcttcttcgccttgagccaatcctcgttcttgctcacgttcagctcgtcgagcatttcgggcaaccggacgtaccttacgctgaagaaggcgttgcaggccgccaccccgagcgcgcaggcaatccagctcttgccggcgcccgacgcgcccgtgatcacgacgttgcggtggcctcttatccatgtgcagttggacagctctatcagtttcgtgcggtcgagcttgcgatccgcgtcgtagcggacatcggcaatgttcgcctcgggatcggagaagccggcctggcgcaacagcctcgtcctcctgttgatgcggcgcgcgtcccattcggcatcgactatcatggcgaacctctcgtcgaaggtcatctctgccactccttgcgattcctcctggtcgcgatacgcttgcgccatcaccgacatcctcatgccatagagtttgtccatcgtcgtctggctcgccgtcattattcatcgtccccctcgctcaagttccggtagtagtcgcctccgcgcagatacgctccggcgttttggtcctcgggccctgcggcccccatctccgagataatcgatttgatcgtcttgtagctcggcctgggcgttagagagcaggccttggcgcacgcctgctcgagcatctcccttccgtgcttcttcgcgagcgccagcaccgcgcggcacgagcggtaggactgctgctcgatcttgcgcgacctcaagatggcatcgacggcttccccgcaggacgggccgatcccggccgcccatttacggaagcgcttcgcgtcccactccacaaagtcgcgatgggaatcgggcatgtggtcggggttggtgcggtagcttcccctagggccgtagatgcgctcgtgcatggcgattcgctcgccgtcgcaggccacccaaacagcggatctggtggcgcatagctccacctcgcgcttgacgtagctgaacggaaccgagtaccagcatccgtcaaacgagacgtggtagttaaaattaacagtgacaaccttgcgggtaaccatctcgtagggcttgcccggcagcgggatgagcagcggcttctcttggcggacgaagacctcatccctgctgccctcgcgcttctggaacggacgggcgttgatctcgcgcaccttctccaaaagagcctcgttcagctgccggagagaggtgaacagctggttgcgaaggggcgcgatggcgcgctgctcgatgaccctcacgctcatctccaccgcccccttgtccctcggcctcctggggcgcgcgggcacgacggcgcacccgtagtactcggccatcctgcggtactgctcgttgatcacgagctcttcgacggtgttcttgacgacgccctgcttgaggttgtcgggaaccactatcggcacgctgccgccgaagaaggcgaaggcgtggacgtgggcctcgacccaggactccgctctcatgttgtaggcgccctcggcgaacatctcgcccgaatagggcaagcacgccacgaagacgtagactttgcgcgcctcgccggtgtcggcgtcgagcacctccatggtgtcgccgacgtagtcgacctgcatctcctgggcgggtttgcgctcgatgcgcatggagaccttgttggcggccgcccaggcgcggtgcttctggcagaaggcggagtacaggtagggttccatgcccgatgccagggcgtcctcgcagtactccctccaaagcgtcagcatggtcatgccgggacggttcatctccttgtcgatgcggggatggtcgatctccgccttcgacatatcggatcgctcctttgccggatagatgacggctcgaatcgccgcatcgttcatctcctccggcaagggccactcgaggccgtgcgccttcgcgcgggtggtcaccgcccttaccgttgcggtggagcacctgcacgagaacgctgtgttcctgacactcacccccatcgccctttgccgaagtatttctctgtacttgaccattttttcttcctttctcgcaatggtccgatgggcacttttgtgcccatcggaattgtggcggaaaaggaagcgcccctttcggggcgcgtggcaatttagattgttagggtgtggcagtctgccatggagcgctgtagcagtggagcgtggaacggtgtagcaaaagcgctgcaatagtcaataaaagcctaaaaaaagcaacacaacttaacgatcattcgttttggatagaaatcgaggatccttgcgatttagagtcgctggtagtagagcgcttcgtttcgaaaactggagttcaagttggttcgtcttggttttcccaagaagagtacagctcgaaaattggttcttggttctttggccttggccaagaacgtcagaaaccgacagcgaatcagctcattggtcaactgattagaaattatttcgttcaagccacgaaaacgcacaatgcggaatctgatctggaaagtggcatgcgtattggctacctcttgggtttttctcctgagattctgtcgaaggcgaacgaggtgttgtcccgcgaaaaacagcagcgggaaataaagaaggcggtcaaggcaggtgttttggaatatcttgatcttgatgaagctgggattagagccgatttggcgaaggctcgacaaaagcacgatctgcttagcgcggaattgaagcatttcaaagttgacaaccaatacgctgagcaccagaaaagggctgatgagatatctagaagcatacgcaatttgaatgacaaggccgtagctcttgagcagcgttgtcgagatttggctgacgcgagcaaggtcgaatcatccgatgttatacatgtccaaaaagatcatcagcttaaggccctgtatgaggaagtaggcataatgttgccggacaacgttgcgcgccggttcgatgaggtggtcgcgtttcacacttctgttgttcgcaaccgtcgtcattttcttcacgaggaaatgcagtcgataaataagcagctcgaaagtgtcgcagtcgaacgaaggcagctcgactcggaacgatccaagataatgaggctccttgacgagtcaatggctcttgaaacgtttcggagtgcagagatggaagtagctgagttggaatcaaagatcttcaatttggagactcgcttgagaaatgcccagcaattcactgatattaaacttgatttgaaaagaatgggcgtcgaagccgaatcaagcgtgcgagcggaaatggaggaactttctcctaagctcgaagaggctatgactctctttactcagcttggggaggagatttatcgggatagagacatttcccttcgtatagagacaactccgaaaggggttttgaaggtaacgcccaaaattgatggagacgcctcggctgggatagccgaggttaagacattcctgcttgacttggtctgcgtgataatggggattaaaaatggccgcgcgcctcggtttctcgtccatgacagccagctgttcgattcgatggatgatcggcagttatcctcctgcttaaatattggcgcacgcctcgcggaagagaatgattttcaatacattgtcaccttgaacaccgatagattggaagcagccgagaaggaaggcttcgaccgttcgaattatcccatgaacgtcactttaactgattatggagagggtgggggcttgttcggatttcgtttcgtataaagcgaagagtcgagggggagtcgaatatctcttttgctgtgcctgccgctacgtcctcctgattgggaaacccatcttgcgcacaccattgcgaaggctgcgatgggtcttttgacaacggatgcttggattgttgcaatatatgacacaatccaagcatgaaagcatcagaatgggttgcccatcgcggcatcattcacgcaatccgttgcgcatctcgagcgaaaaggttatgattcgcttgcaggaggcatgaccttcaatcgatggctgcgcgcatcctgcaggcaccttcaaagctagtctccaagaccctgatcagggaggttgcacgttgccctgtttttgagggtcaggcatggtgacgagggttcgaatccctcctcctccgccagtttcaaatcgagcggcctcgcattgcgcggggctgtttttttacccgtttaatacctatcgttaaattttttcggtgaacggcatttgctccaaagagaagcgccgccctctttttttgttagtttaacgacatcatttttttcgcctcccatcagcgccgttactgcggagaaccgttctcatgaggtaagcgttttgcctgatagattaacaatttagtcaaatataaccaagctgcgaatcgttgaagctaatttcttacctatgctaaaaaacggtgagttagcaacttagaaatatctggtaggaggctggatagaagggtattgatcgctggtagggacgactgtggtctttccgtcgacgttgtatcggggcgagggatcggctgactgcaaactcctgtgcgtaagacgattcgcattttctttcagcctccaaaccgaaacgactcgacgtagaggtgagccgacatgaaccgcaacagcaaagcatttaaggtgcttgccgtcctgatgaccgtgactttggcagtacctgctctgggaacgagcgcagcgcttggaaccgagagccctgcccgcaccgctcaggaaacagtcccaaaatcgcggggggggggtggatatttctgctgagggttctgcttcttcaaaaatttctgacgaacgcatagtgccgatatcgccgtatgatgcaagagacgacgaagacgcgggcgaaggccaatccgattcggcgggatcgcaaacgccgagcgcaaccgatatcaccaataatatcgatctggtcaagctctcatccaggctggcattcggcgatgagcgtccggataccgtaaccgaagcgggtctgcccgacaacgttccaagccagttgagcctaaccgtcgagatggacgaacagctcggtaccgccccgttccttttgcgcatcaagttgccagaaggcgtgcagagcaacgccgcatccttcgttgagggcgacgcgttccgcttggattaccgggtcgaaagcactgaagacgacgggtggttccttgtcgtcgaaggcatgcggaagtcgagcgcctcttccaagaccgtcgcgtctttcgacatggatgtgtccattgcctccatcctgttcgacagcacgcagcagaatacgatcgagtggcttcttcaagatcctagcgacctcgaaggcgacgaggtcaaatccctcctttcgcttccttcgaaaaccgatctatgcaaaacatgggatgttgccatgaacggcgacattacccacaataccgaagcccttaagctctccgccgctctcgaattctccgaaacgcggcccgaaggcgtagagatcgatgtttcggatcccagccaaccgcagttgcccgaaaccctccccgcaacattgacgctcgatttcgaaaccctgatgaaggcggcagcgggaagcgccttcttcgaggtagccctgcccgaacacgaatacctttcgattgcggaaaccgagggcgagcttgcaacggcaaacgcatcggctacctataccgtcaaagacggcaagctcaaagtgacgttctccaaacctgcttccggcggcgaaaccctcgaaccgattgccgatgcgatcgcgatcgacgttttcgtttcccgcgccgctcttgcggaagatgaagaaagcgcactgaccgaatggattctccaaacgcctgccgcgacggcggtcgatcctgatccagcacctgtcaaggcagctctcgctttgccggctgcccacgcgctgcttgaaaagtgggttcccaagccggtgggagatccggttgtcaccaccaggccgggtgcggccggcgagcaggcggtgctcactaccatgtggtgcgacaacaacaaccattcgctgcgacccgatgtgaacgggcttgcgtggcagagcaacctggttccgtatttcaccattgagggagatgcgacgccctatccgctcgtgaaaaccgatgcagacgggaaccctgtgctcgacgccatgggcaaaccgatgatttccgacaaggcgaaagagcttctctatctgagcagccttccggcgaactaccttaccgttatcgaaccgggagacagcatcacagaggtttctacctccggtttgcctgctactgcgatcaaaaccacgacgatctcctatgacgatggcactgttaggaccgaaacggaaacgaagaaggttacctggattgccatcaaagatcgcaattcctacgtcgacgatacgggtgcgcttgtttacaaacgcaacgaaagcattcccgacatcgattcggccgagcgcgataaactgcaatacatgcaggtcgttaattctttcgagttcaatatcgtcggaaaaatcggtaacaacgacctgcacgaacttatagaaaagctggatcaggtgaatccagaggcaaagctgtgtttgcatgtgcgcatcgctgccggcggcgggtacgaagaacagagcgtggacatcgatgtgcgggatatcatcaacgatggaggcatggacgtagccgacctcgaggatgcgaacggtttgacgctgaatgcagcagggtggccggtgtactgggtcaacggcaatcctatcgagtacagccttgtttacgaggcgaatcccgacacccaagccgaatacgctgattatttccagcctatatacgacaatgcggcatcgcccaatcacggtgcggcaaccgatgccgtgtggccgggaggcacgctcaacctcgtgcacgtaggcaacaccacgttcaacgccaccaaggaatggatggacaccgatgccagcggacgcggcggcgtcgtcttcacgctgtggcgatattcggctcgaccgggcggcagcgcaacggcagtacccgtatcgtttaacaggtcgcaggttgcgatttcggtcgatgcggaagtaagtcaggcggccgcaggcggcatcatcgatcttggtgctctactgcgcgaagagtacggcgatttcaagctcgacaagtacgatcccgatggatacccttacatttacgctttgcgcgaaggacccctctcgaacggttacgaacgcgttctcggcaaggttgcaaccgacgctgcgagtaaagagacggtaaccgatacggctcccaactactatgagcccggtggagaaggctccggaacagacgccatcgtgtacgtgaacgacggtgaaatcatgcccgccgagcgtcttgatggagaaacgttcatctacaacaccggcacggttaccaatagaaaatccggcaccatcaagcacgttcaaaagaaaacctggctcatcaacgcgtttcaggggcagctgaccgatgtggcgtgcacgttccaggtgcaaagccgcgtgctcgatgaaaaccgcccagaaaccgatgataccgattgggaatttgccgtcaacgagaagggcgagcgctacgaggcggttcttaccgattggacgcttgagaatctcacgcaggacatatcggcaaacctgcccaagtacaacggggagggcaaagaactggagtaccgctgggtcgaaaccgctgtcacgcaaggtggaggagaaaatcttctcaaagacggttggttcacgctgacgcttttcgatgcggatgggcgggaagtcacgcaggatttcttctcgacaacctaccccgatgatccgaccaccatcgtcaactccttcaacaacgaaacggacgaggtggtagacaagtggtggcagcccgagggcgcggatggcttcacgcaggatcccgccgttttggcgcagtacggcatatcgagtgccgaggctacggttcgtcttattcaagacgacgtcgaaatcggatcgttcactatggacggcaagatcgatgccgcaccgctttccgtcgacgggctgcacggggcgacctatcaagaaaccagcccctatcatctggaatttcgcaatctgccgaaatacgatgaggaaggatccaagcacatctaccttgtgctcgaatcaggcaccgaacccggcgtttggcacaccgagcgcgattatacgcccgataccgatcggtacccatgcgccgcgggccacacagtgaacctcaccgaactgtggaacacccaagggccgggagaggcgagcaccatcaacgtgaccaaatcatgggccgatgggaacaactcctcttcgagactttctgtgctagtgcagcttgtagcgaaaaacgatatctacagcgcgatcaatcccgatcagctgatatttaagtccggggaggttatttctcccggcgtgcataacggatacaccgtatccatgaccaacgccgatgccgaaggttccattctcatcaccgagggattggcgtggttcgaagacgtcgacatcaacatcggcggtatagagctcgacgatgtggatattcgggaaacctttatggtggacaaggtggagtacgacgttgcgaccaagaagtggtcggtggcggccgattctgcgtactacccggtatgcacctacgacgaagccaaggctgccggtgtggaaaacggtgccgtgaactggatgcgcggatgggaatccagcaaaaacatcgagcgtgtcgcaaccaatgaagatgatctggttaacggtcatgtgtacgaggtgacgtacggcgacaacgaagtcaagcagtccaaagaggtcgacaaccgacggctgggcatcgtcgacatcgaaatcatcaaggagtggatcgacggcgatgatgattgcgtgcgtccggcggcggaagtcgtgctgtacagcacagatgctttaaagcagaaaaacgccgatggatccgagcgcccgtacaacttgttttccatcaagggggatgaggtcttcgtcacgttgccgggtggcaacagccttcccattcagcactacgatgaggcttcgggtggccgcacgaacatcagcgtgagcgaagcgggcatttacctggaagacgacgagggaaacaactacggcagcgatgacggcgcgactggaaccaaactcgtcttgcccatcgatacgaaaaccatcggcgcccaaggcgaaaaaatcgatgatttcgaatacgaatttgccagcatgcccaagttcgacagcaacggcacgatgattcattacgctgtcgaggaacgctgggcgcaaggagccgatcgaagcgagtactcgtcttctttggttgccgacgagtaccaaagttccgcgcttcatttcgaggatatgcagcactacgatatgaccaaccgccacgttggcagcaaggccgtagaattctactacgattggcacgacgtgtatgtaaacgaaacgctcggcaagcgccccgacatctacatgacgctgtacgcgctgcagcccgacggctcgcttaagccggtgaaaatcgaatacatggccgtcgagaattgggagaaacccgacggatctgcgcccgacgagtattaccagaagataacgatctcgaacctgccgaaatacgacgccgaaggcaacgagatcatctactacgccggagtcggcacaacaatcgattacgcgaagtacgattacctgccgcatgggcattcctacgaacatgtagacgccgccgtgcccgaggcggagcgggaaatgatcttcgatcaagacctcgccgacgcgaacgcgggcaaacgcggttgggtgctgcgcgaagacggcacgttcgtattcgccatcgataacgatatggtcgtgggcggaacgaagctgtggtcgaacgtgcccggcaacgtagaacaaccggtcgatctgcctgacataacgatctatctgcagcaacgactcaaggttgaggggcagggcgttgacgagggggagtggggcagcgttgagctcgaacgcgatggcgacgcgttgaggtttgtcggcgataccatcgtcgcatggacatccgatttcagccacgatagcgttgccaaccagtacacgttcaaaatgacgcactacggagagaattccataggcgattcgggtactgcacaatcggtcgccggctttttaggatctctgcttgccggcggcgtgggcgcagacggcaaaacgcttctgccgaaatataacgaagacggcgtgccgtacgaatatcgcctgttcgaaatggtgaacggccttgccgatgttccgggcgggttcaaccccgacgattacatcggtaaggaagttgccgtggaggcgctgagtgcgctggtgggcaaggtgtttaccgtccggcatggcgatggcggatcgtttatgatagaaaacgcttacagcgccgaaacgggtcgtctgacagtgaagaaggtgttcgacgacgaatttcgcattgacggcgaaccgtatcccgatgtgacgttcagcctgtaccgccagtacgaaggcgcagacggcatgagcgaagcggcgctggtggccacccagacgatcgcgggaggcgatttcgagaacgggatggggaaagtcaccttcgataaccttgaaatgtatgcgcctaacggccgatactggcagtactacgttgtggagaaggccatcgacgggcacgagaccgcggtcatgctgggagaagcccagaacgcttccgatcccgggttcgacaaaggcacggcggccgatggcggcattcggtccgaatacgccatgaacgatgacggaaccaccatggtggcagatgacgacaccgttgacgtgactttcgccaacaggtacgtgccgagtaagatcagcctggtcggcgagaaggaatggagcgattacggcaatgttttcggcctgcgccccgacaagattgaaatctcgctttcccgcgtgagcggcaaggggtggaccgatcatggagcggataaccccatcaagctgcagacttcggatcagagcgccgatttctaccttcaatgggattacggcagcagcccctcccaagccgatagctggaagtacacgatctcgaatttggaacagtgggcacccgacggaaccgcgtggcgttataccgtaaccgagactccgctcgatgaaagcctgggctacggtacaaacccgtcgagcggcaaggtgacggccaacgccgcgaacgccaaggaagacggtacgctttccatcaccgccataaccaaccgtctcaaaggaacgtacggcgtgcggaaaaactgggaagacggcggtgatccatggggcttgaggcccaagagcgctacggtcgttttgcaggctcgggctgcttctcagggtgccgacgccatcgagggcaccgcgcaggacgtgctcgccgagcttgttggggacgacgcggcgctcaaggtcgcattgggcgattcgctctacgaaagcattggcgaaaacggcgttgtgcttgatgaaggcaacgactggaaccatgaatggtcgacgcttcccgtcagggtgaaatcgtcgcgaggcgaggtctacgacatcgcctacagcgtcgtggagacgaaaatcggcacagccgaagtgaaagacggagccgctaattcctatgtggtttcctacgagtatgctgccgacggctcgaacgccatcgtcaccaacacgctcgaaccgaccaaaatcgaattccagaagcaatgggacgatcaggacaacgcctgggcaacgcgtccgggaacgggatccgaatggaagctcacgttttacctgcaacgcaccgtgaaggaaaaccccggcggcggtgccgatggcgaatggaaatggatatccgaagagcacggggatgttgatgactggtcggatgacaacgatttcgtcaaacaggaagtcaaaggcgacaacggtcaaagcctgagcgaagtgttcttgttcgacaatctcccccaggttgacgctgcgggcaacgcatacgcttaccgcgtggtcgaacatgcgccatggggctacgcgcccgatggggtgcagttcgtcggccaatcatccgatgggcgctggctttggacgctctcgagtgcagccggcccgcttgtgaacgctttgcagacgatcagtgtgagcggcaccaagatatgggaggattacggcacagggatggcgcccgacttcgattcgggcgagcgccccgagttggaattgcgccgcagcacgaccaaagccactgggggaaaccttggcgagaaggcgacatacgcagacgggtcggttccgcagcccgtttgggagaagaacggcgacggcacgtggaggtacacctactccgatctgccgcgctacgacaaggggggaaacacctactattattgggtaaacgaggtgtcaagcggcgataccgaagccggtttctatccggtgtactcgtatacgatggatgacggctccgataaggccggtcccgaatcgttcggctcttcgggcacgaccgtcgatgggagcacgggcgaccagacggtccagaccattaccaactgccttacgcgctttgcgctcgataagctaagcgaggaaacaggagccgacggctttgccaagaagctgaacggcatcgagctttcggtggtatccgaagacggagccgccacgtacgccgtttggatccgcgatgggagcggtgccgtttccatcaaggtttggcccgagggcacgacggatgcatcgcagggcggtatcgagatgatcggcgacaacgtcgggtgcatcgccggcctgcttccaggtgattatctcattcgcgaaacgggcgccgctcctgcgggccatgcccctgcgaaggatgtttcactgcacgtgtacgataagccgctgttggttgacggcagctacacctgcatcgaatgcgaaggcgaagcgggcagcttcgaagtgcggcgatccgatgcggacgaatacggcgtttcgctcgtgagcatcagcatagtcgatccgatatttcgcgcatacgtatcgtttgcgaaaacgcttgatacaggtgccaaactcgaaggcgcgcagttcgatctgtatcgggtaggtacgggcgcgggggggccgagcggcacggatgaaaaaatagcaacgggaattgtcaccgacgaaaacggcagatggacatccaagggaagcgcggtggagtttctttccaacgagtccgacggccgcgcgactttgggcgaagggttgcttccgggcagctactacttcctggaaaccgatgccacggcaggcggcgtgctgcctcgcgaccctgtgacgatcccgttcgagatacagcagggcacgacggcggcaaactcggatcatggcaaggtgaaagacatcacggcggataagggcgggtcccttgtcaacgaggcgtttgcagccaccgttacgcttccgaaatacgatacgaccgataacgccggcatcgagaacgccgcgttcaagctcgagtacgccgagggaaccacgacagacgatttcgagaaggcggaatcagagggcaacatcgaggccatcgaggagaaaaccggcgaaaacggcctgcttgttctcgggattaccaagaagggcgtctatcgcttaaccgaaacgggcaacaagggctacggcgttccgagcggcgggctcgtcatcggaacgttcatcgtcgaagcggaagatcacagaggttcgtttgcgctgaacgatgcctcccaggcagccgagatagaattcgctcctgcggaaggcatcgatctcgaccccgttttgggccttgcaaacgatcgtagcaccggcgcggtggatatcgcgaagatgggttcccagggcgaagacggcaaagatttcgcgcttatcagcggcgcgacgttccagcttgaactcgagcaggacgacggctcgtggaaaaccatcgccgaaaacctggtgactggaaaccaatacacctacgacgcaacctctgtcgaggctacggcgaaaaccgaagcggatcatagcgccgggcgcctgaagatctcggggttgccctggggcgactatcgcttggtagaaacatcgcctgcgcacggttactgcggccaggccgaaaaggaattcaccatagcgcgcgacactgccggtcagacgctggaatacataacagaaaaggatgctctcaaaaacacgcccacgaggtttgctcttgtgaaggagagtgaagccggcattgcccttgcaggcgcagagttcgaaatcaagccagccgaaggcagccattttgccgattggtcgaacgacaactcggtggagctttcgtccgaaccgatgaagatcgaggtgggcgatgacggtcggtactctttaagggggccgctgcgcctcattgtcggcgatacctataccgtaaccgaaaccaaggcgccgacgggtttcaaaaccatcgagggctcgctgctgatcgaggtgcttgaaaccggcacgctgaacatcgtgggggaggctcccgcaggatacagcctcaacggcgatggcatcacgataacggctgtcgacgaacctatcgacatcgtgctcaaaaaggccgatgcggacggcaatgcgcttctcggcgccacattcaccatcagcggagttttctccgattccgtaagcggtgttccgacgacccatgcgatcgcccttacgaaggcggatgcctacatcatcaaaaacgttgtggtgggcaacacctacacgattgccgaaaccgccgtgcccgacggatacgagaagattccgggcaaggcaacgttcaccgtttccgaggacggtacggtggcgttcgacggggaggcctctctgtcttacgggatggcagtcgagggcaatacggttacggtaacggccaaggacccggccatagaagcgcgcatattcaaagttgacgaggtggacggcgccacgccgctagcgggagccgtattcaagattacaggcgcattcgtggacggcagcaccgagaaaacggttaccacgaaagatgacggatatgccgaaatagaatcaggccagcttaaagcaggtgaagaatacgccatcgaagaggtgcaggcacccgccggctacgagcttgccgggcgcgctacgttcacggtggacgaacgcggcgtcgctgccatgacgtccagcgcagtgggtggaaacggtacgtttgcagcccttgccgaaggcgggatcgccgtgatcaaggcgaccaacgtggaaacggagatcacgatccgcaagaccgacgatgagggcgccccgcttgcgggcgcggaattcaccgcccttgccgccgacgggagccatgagattcgggcggtcaccgacgaggacgggacagctgctcttcacggcctcgttgcgggggtttcgtacacgctggccgaggccaaggcccctgcggggtacaagcagctggccgatacgctgtcgttcaacgtgctgacggatggcaccatcgtggccgaaggcgaagtgcccgcggcgtatctgataggcgatgggagcatctccatctcggtggtaaacgaaccgacgtccatgcgcatggccaaggctgcatccgatggagccccgcttgcgggagccgagttcgttattgcgcctgccgccgcatcttcgttcgccgacggcgcccacgcgcacacgcttgtatccggcgaagacggctctaccgaaacccttgagggtgcccttgtcgtcggggacgtatacaccgtcaccgagacgaaggcccctgcggggtatgaactcatttccggcagtttgactttcggagtgaatgccgacggttcgctgcaggtgctcggcgccgcgcctttgggctactcccttgttgatgggggagtagccatcgcggcgaccgatgctcccatcgaagccgccatcagaaagatcgatgcgcagggcgagccgcttgccggtgccgagttcgaactcgtgcccgccgaaggatattggtttgccgatggaacggctgaagcaaaggtcatcgccgtcggcgaaagcggtgtggcagtcctcggaaaagcgaacctcgttgcgggatcggagtatctgctgagggaaaccgaagctcccgaaggatatcagcgaatcgagggcatggcggcgtttaccgtggcggctgacggaacggtaagccttgcaagcgattcgcccgaaggctacgaaatcgacaccgacggtgcaaccatcgtggttacgaacgagtcggggttgcccggtctgaccaagaccaacgattctatgggcaaggcggctgcggtgtgcgctgcgttggctgtaatttcggtagcatgcgcagcggcgagtggactgcacggctttcggcgtcgccgaagctaaggcccgtgccgtaccgactgccgaagaagggcgaagataggcgaagcgggagccgaacggctcccgcttcgctgcgtgcggaaaagaaacttgataaccgatcggatgaggctacaccgcctgctcgttcgcggcgttttgccccgcgatgcggccgtttaccaggcagtcggccgtagcacatgatcccaggcggcatgcgccgtggattccgccaaccgcttcgcctgcagcgtacaggccgggaatgacttgaaggttcatatcgagcacgcgacagtccacgtcggtcttcacgccgcccatgcagtgatgcaccttcggccacagacgcacgccgtagaacggggcttcgtcgatggtttgggcatcgtcggggatgggcttgccgaagtcttcgtcaaccttgttcgtcacgaacgtgttgtagcgggcgatctctttctttacggcatcaaccggcatgccgtagtgttcggctgcttcctcgatcgaagcgaattcggtcgtgatgcctgctttgatggcgctttcaaggccgcttcccccgtcgtaaagcgcttttttgcaggtgatctggacgcagggctggccggtttccagaatggcatccgcatagcgcttgcggtcggtcagctcgttgacgatgcgcttgccggtggcaacgtcgagcgtgggagcgtagctcgcttgcccgtcggtgtagaaggcggcaacgccgtagccctgctcgtcggggctcatgaaggggagcagctgaatccagtcagtgtgcaccgccatggctccggcggcaaccgaagcgcgcaggctttcggccgtggcgccctcttggttcgtgcagtcgaccgtatcgtcgagccgtgggtcttgcgcctggcgaaaatcgaggtcgcggccgaacccgcctgctgccaacacgacggctttgttcgctttgatggcgacgggcgtgccgctttccgtatcgtttccgctcggcttgtcgtgcacgatcgcgccgatcacgcgtccgttttcgtccttcaccagttctgtaagcatgcgcttcgtctcaacttcgacgcccatttccttgagcttttcggcgaacgggcccgtgacgttcgctccgccgccctcgccctgcgctatggagcgcataacggtgtggccgccatacgggtagaggaaatagtcgccgtcgtcgtttttcgcccaggtagcgcccatttcgatggtccactcccacgtctcgttcgatttttcggcgataacgcggcacttttccttatcgttaaggtaaaggcccgctaccatcatgtcgtccacatactgctcgacggagtcctgcacgccttcgcgctcctgaacgctggaattgcatacggcgaaatcgccggcggcaagggccgaattgccgcctacgcgcgcggtcttctcgatgattttaacgtccgcgccggcgtttttcgcttcaagggcggcggcgaggccggtgtatccgcttcctacgaccaagacgtcgcactcctcgtcccatttcgtattcgttccgtttccggcagccgatgcggtttgttccccttgcggcgcgcagcctgccaagctcagtccggccagcacgcttgcagcggccgctccggttatgaacgagcgccgggatactcccgtagaatgtgatttcgtgctccccatagatgcctcctctgttgcggttctcttgttcgttgctcggatgcgctcgaacgcgtcatccgttgaggcccagagtaggcaagcgggatcggatttacaccccacctgatgcgggtagctgcaaaaccccccttgaggtggggtgcgcgatcaggcgttatgcgatgagttgtcggaggagacgaggtcgatgatctcctgcttgctgtgaactcccagtttggaatagatggtcttctggtagctcttcacagtgtttttcgataaaaacaacgtctcgcagataaacgtgagatcgcgcccttgggctaagaggtagagaatgtctccctcgcggttggtcagcccgtgctcggcggccagatcgccgcaccgcagctttcgcacgttttcctgctcctgttcgaagcgtcccagcagttcgtcggcggcgcgggcttgcgattccgcccgctttcgttcatgtgagttcaccatccagatgaccatgaggataagatacaaaaggaagaacgcaaccgccgtggttcgcacgaaatcggtcgtgcttcccacgccaagcagctgtgcgacgttttgcccgacgaacaacccgaagcgaggcagcgcgtaggcaagcgagatgccgacgatcagcttcgtgcggcttcgcgcgtacgtgacgactacgagatagaacagcgaaagcagaacaagcttccatccagcggcggcaagtatgttgagcgatacggcgtagtcgctcgagaggaaggggagaaacaatatgccggttgccagaacgccgaaaaccacgttaaagagcagcgaggttgcaggctttgcccgcaggccgaagtaagcgaggaagatgacggccgccgcaatgccgccgaattgcgatatgaggatggactcggcgggcgaggagccggtgcccgcagccgcggtgtcgatgatgccgtacacgatggacagggcgaacgtgcacacgcccgatacgagaaacacatcgaggaaatcgttcttcgtgaggatcgcgtgggacgagggcgcgcgtcgggaggtcttatcgccgtcgcgccgcggctgttctgcgtgatacgcaaacgcaagacagaccgccgacgctgccagcagagccgcatgcaacgcaagcgatgcggcggcgggagcgaagccgagcagcatgttgatcgccatgcccccgagagacatgatgccgaatgccgcggcaacgcggcggggcgaatagcgggaaaacgcttcgaagtaaaacggcatgacgagccccatgcccaggccggccgccgcagccgacgcggcgatcacggtagggtcgagatccgtcgttgcggcgaaaaacgcgcttcccaaagcaaaagcgaacccgccatagccgatcgtaagatagaccgtgcgccgaaggggcagcctcgaacttaccagaagcgaaagcagcagcgaagctgcaagtatcgaggggttgagcacgttgtcgaacgttgcgggagaaaagtccggccgaccgatgagccaactggaatagaaaaacgaaacgcatacggcgtacaggcagacgaacccgataacggcaatcggatagcgatttgccgtaggctgccgtgctgcgttggttgtgcggtttgcttgttccacatctcctccgttgcgatcctgcggctgcccgcgcgaaaccaaccgccagggaagcctgttgcttgacgcatcgcggtatcgccgtttcgagattccctcacctcaatggaaagttcgcatcattgtatcattcgccgggcgcgctcatggtaccgatgggccgatgcggacgagcgcaggcgttcctgaaaagccgcttgctttcttaatacagcaccgggttctcatccatgagcagctccttgagccgagggcgatcgagaatttcaaggtgggtcctcgtttttcgcacaacaccgcgctccttgagggatttaagcagtttgttgcaggtggcgtaatggatcagcagcaaacccgaaagttcgtcgatggtgaggttgcagggaatccggtagacgccatcggattcgggcgcgttcgcctcgcagagcttttcgagccagagaagaatgcgctggctgctcgattggtgggcggtcgtatcgaggcgatgtcccatctgggccatgttcatatgcgaaacgtacaggtaatcttcgagaaacgcttcgtccttccgtatgaattccatggtctggcggtacgtgaacccaacgagcacggtgtttctgacggctttcagtgtgaagcggttggcgccgaacgataagaatccctgtcggctgcagatgacggcatcgccttcccctctcacgtagaacaccgtgtacgaatcggcgccgcgcatcaagcctgcttcgagtgctcccgacttcacgaagtacagatagatgtcatcctcgccctcgcacacggcatcgattttttcgtctacaaaaagcttgaccacggttccttgatcgagatagcgtgtgaaatcgactcgctggtgcagcgcggacatgaagacgatagacgtctcgtcattgcatcctttttgtccctttaccctcatgtcgcctcccgcttgcgccaaggctgcaatgcctcgcagattccctatgttgaatgccttccccgcattcgctttcagctgaacgtattgtagcaaagccgatcattcgccaaataggataaataccctcgcctgcgcgcgggtgcgacctgcgcaaaaaatggggtgctctgcaattcggcgcgactatgggcagaacttgttttttcttacaatcgactcaggggaatcatgccagatcacctcggcaagcaagacgatttaggaggaagcgaatgaaagccaagcaaagactgactgtgctttcggtgtgcctggtgctcgcactcggccttttggccgcatgcgcgccaagcgaaacgaaagcagacggaagcgacgatgctgcggaaagctcgtcgccgataaactacgatagtttcgggcgcatagggaataacatcggatacgccgaagacggggggacctatctcgagaattacgcggagtatgccgaaaaactcaagtacgccgataaagttgctgccaatgcagaacgcaatactcccgaaacctataccgaccaattcgggtttacctaccaacctgttccgtccgatccgaagggttggaacatcagctatctcgatgccgacgatcgcggatgccttgcctgccacgagtcgatcgaagacgtggtgatgagcctcgataccaagcacaacgtgtatgcgatgggctatcccacgcaggtgacgatcgcaaactgcctcggttgccatcgcaatgcggggttcggaaacattcagctcgtggaaacgctccatggcatccataacagcaatcctcagttcacggcgatggacggcagctgcgattcgtgccactacatcgattccgatggcaagttcgacctgtgggattacgcgaagtacgacctgtacaagggaatcaccgatgtaaaggcagaggaagccaacctcgacgtcacatacgatcaggacaccatctcggaaaacagccagctgttcttcgaatcgctcaacaacgagccttccgagtggcgcaccgataccgatcctgcggtagcggacgcctggacgctcgtcatcgatggcgaagtggagaaccccatcgagatgacggttaccgagctcgttgagaagttcggcaccaagagctctgttcagaagcagggctgcattgaaaacgcaacgggcaatgcctggatctaccaagcagagctgaccggcgtttcgatgaaggacatcatcgactacgtgaagcccgcttcgacggttacgaacatcaagtgcacctccgaagacggctataacatggtttcccctggtttcaaggagatcaactacgaggattgcctgctcgttaccgagatcaacggagagccgcttcccgcgcatcagggatatccggttacgttggcggtgccgcgcaattcggcagcttcctacatcaaggcgattcagtccatcagcttcgtaaccgccgaagcggacgattccgatgaggaagagggggtgggcacgccgctcgaccccgacaccggcaagatgcagggcaagcccaacagcgcgatcctcaactatcccgacggcgttgttctcgacgggcaggctggcaaggaaatcacactcgaaggttacgccgatgcgtatgatgagccgatttcgaagatcgagtattcccttgatcacggtaagacgtggacgacggttgagacccccgacaacgatccgacccggtggacctactggagactgaagtacacgccgcaagaagcgggaagctatctgctcaaggtgcgcacgacgagcacgcagcccaacggcgaggatcgggtctgctcgcgcgataccaacttcattttccatgtaaagtagatcggagatacgagcatgcaagactataagagaaacattcttgccggcaccatggctgcatccctggtgctcggcggagcaggaacggcctttgccgaagaacccgcacaggaaacggatggcaccacgggcgcggcgacgccagctgctgtggaaagcgctgctgcgagcgcctcggcagccgctgaagccgatgctgccgagggggcgttcgcctacgatcagaccacgatcaccccgaacagcatcatcagagacgtgttccagcgcgcgaccgcggcgctgtgcaacgcgaccgacgattttgccgtgagcaacccgcttgagtggaaaattgcggtatcgggcgatgtcgatcaggcgtttacggctgcagttgacgatcttgcctccgaaagcagcgtgaagcaggttatgacatgcacgtgcgggggaaatcccgccgacggcgccgcgatcatcacggccgacgtcaagggcatcccggtttcctacctgcttgatcgtgccgaagcccgctcgggagtcaacaccctgacgttcgtttcgagcgacgggactgagcttgcgatgccgcttggctatgtggtgggcaggcacggcgtgatttcttacgagatcaacgacgaggacctttcggcttcggttggcggcaacaaccagctgtggatgacgcgcacgcccgccaactacttcatccgcgatatcgttgaaatcaggataaccagcgaggcgaatccccctgcgaatcccggtgaggagatggattttccgaacagtccgaacgtgggcattctcaaagccgagatcgactaggaggaaacggaataaggcaaaacctcggcgcccgcctgtttaccttgcgcagtcgcccaaccgtcccgtcggcggtcgtgctctgtggcataatatcggcaacaagcatacagttcgaaagtctccgggaggagacgatgaccgatacgaggacgcacatggtagatcgcgttgttgaaagcggcgaaaccgaggttcccgaaatccccgagattctcgagaaggttttgctcttcgcactcgacgaggcaaaagagaagatgagccagggagccgacgtcgtgccgttcacgacgctcgtcgttaaggaaaacctgttcattgaaagccatccgggagactcggccgaagagtgcttcgccttcgcgcgccacaccgtcgagggtgcgcgaggagccgaagcgtacggattctgctacgacggttacgtggaaaccgatgcaggtacgcaagacgccatcatcgccgagggcggagtccccggcgatgatgaaggctatgcgatcggatatgtttacaacatcgtcgacgacaaacccgtcttcgaaagcgatccggcctacatcggcgccgctccgaacttcatggcgaagctgaaggatgccgcggaatacgacgaagaagagatcgacgagaaatacctcgacgacgagtttgacgaagaagaggttgcggaagaggaatagcctcttacgcctgcgccgccgcaagatttcgaatccgccggctctccttttcgtttcgagagcacaatgcctttcaggctctgcgatgaacccgatacccgcaccccatgcgggtatcggtctgttcagacccctttctgattccttcgcgatagcggatcgcgcggcattcgcgtcggctccgcttccgaaaccggtaaggtttccatccgcccgagtgcgctcatgcatctgtcgagcatcgcgtttttcagaccggatgggaggctgaaacgcgttatgattccgacacgttcggaggacaggcatggacgatgcggcgtaccaagtgtgttcgaagcgtggaagagcgcagaccgagtgcggaaaattccttgcgggggcaaaacccctctgctagaataggcaagctaatcctgcttcgggtacgtgccttcaacagccccgaagccgtaaagtccagaggaggtgagctgatgaaggcttatgaattgttgttttttgtgtctccgtcaatcgacgaagaaacccgtgctgcaaccatgaaacgcgttgaaaccgccatcgccgcaggcgaaggtgccatcgataacgtggacgagtggggaaagcgcaaactcgcctatgagatcaacggtttgaccgacggtgattacaccctgatcgatttccatgctaaacccgagaacatcgcggaattggatcgtgtgctgcgtattaccgacgcaatcgtgcgtcatatgatcgtcaagcgtacggatcgcgactaagtgagcgaatgacacgggcggcgataaaagcgccgtcaagcatgagaagaggtggaagaacatgagcatcaaccgagtgataatcagcggcaacctgacgcgcgatcccgaattgcgttccacggccagcggccttccggtcctcggtttcggcgttgcggtcaacgaccgccgcaagaaccagcagaccggcgaatgggaagactatccgaacttcatcgactgcaccatgttcggtgcgagggcggaaagcctttcgaggttcctttcgaagggaaccaaggtcgccatcgagggcaagcttcggtggagccagtgggaacgcgaggggcagaagcgctccaagatcgaagtgatcgtcgacgagctcgaattcatgtcgagccgcgatggtggcggacaatcttacggttcccagccctcctcggggggatatgcgcccgctccggcggcagcagccccgatgcccgacgcctcttcttcggtctatgatgaagacatcccgttctagtaggtacgaaagaggttagtaaaatgtctgattacgcaaagcagcctcgtcgtaagtactgccaattctgcaaggaagatgctcagtacatcgattacaaagatacacagatgctgcgtaaatatgtaactgaccgcggaaagatcaagcctcgtcgcgttaccggtgcgtgcacccagcaccagcgcgatatcgccgccgccgtaaagcgcgcgcgcgagatggctttgatgccgtacgcggttcctgccgtcagtggtcgtggcgaccgccgcaaccgctaggcaagggggtaactgatgaaagttattttgcttcaagaactgaaaggcaggggaggcgaaggcgacgtgatcgaagtcgctgccggtttcgccaacaactacctgtatcctcagaagatcgctattccggctacgaagggcaacctgaagcagctcgagcagcgcaagcacaacatcgaactgcgcgaggaaacccgtcttggcggcgcctccaagttcaaggaggcccttgagggcaacgtcgttaaggtcgaggcgaaggttggcgaagaaggccagctgttcggttcggtcacgtcggtcatgatcgccgaggccatcaaagagggtctcggactcgatgtcgataaaaagcgcatcgacctcaagacccccatcaagaccgcaggcgagcacgaggttgtcatttcgctgtaccgcgatatcaaggcaacgctgaagctgttcgtcggcgccgctggcgaagagattccttccgaggaagcagccgaagcggttgaggccgccgaggatgccgaggctcgcgaagagctcaaggccatcgaagacgccatcgtcgaagaagccgctgcaagcatcgaggccgccgatgcggccggcgacgcccaggctgcatccgaagcagctgaaacggccgccgagttcatcgaggctgaggacaagcagtaacccggttggcgttcgagtaatcgaccgttgagccgacgaggggccgcatcgcgtatgatgcggcccctctgcatgcgcgggcgacgagaggaagagcttggaaacaggcggaatcgcagttatcgtttcgaagcaaccgcgcgagatatgccagcggttttctgttcatcggaaattttttccacagcatggtgcggtggaaaatgtggaaaaccgctttcgcggcaggtgggaaatgcctggggaaaggcttgcgctgtggataaccgaaaccatggttttaccacacgaaaataccttggtgaactgcggtttttatagtgtactatactgatgccgacaggcgaggacacgagtggaaggatgggcatgccggctagcggaccaggctcctaccataatcccgattttgcaccggaagagacgagcgtcgagcagaaacgcaaatcgcttccccaaaacatcgaagccgagaagtcggtgcttgccgcgtgcatgctcaaccaggaagcggtcgaggaaattgcgaccaagctcaatcccgacagctttttccgccccgcgcatcaacgcatcttcgaggcaatcctcgatctgtacgtgcgccatatccccatcgaccagatatcgcttgccgatcatctgaatgcggcggggcagcttgaggcggtcggtggaaaggcgtacctcgtcgaactgggcgataatacgtttgccctgacgaattggcaaaaccatgctgaaatcgtgaagcgcacggccattcttcgcgaactcatctacgcttcggcggaaatcaacgcgcttgcctacgacgctcccgacgatctcgacgtcgtggtcgaggaagccgagaaaacgctgttcaaggttaccgaaaagcgcgtctcatcagcgtttcagaaaatggacacgctcttgaacgatgcgttcgaggaaatatcggaacttgcgagccgtcaatcgcacatggcgggtgttccctcgggcttcaaggacgtcgatgatctgttccatggattccgcggcggcgatctcgttatccttgccgcccgtcccggcgtcggcaaaacatcgttcgcgctgaaccttgcggtcaattcggccaaagagggaactacggtcgcgtttctttccctggaaatgagcgcatcccagctcgtgcagagaatcttgtgctcggaggcgcgcgtgagcctgtcgcgggtacgcagcggccagctccaggaaagcgattgggccgccatcgccgatgcatgcggcacgcttgcgaacctcgatctctacatcgacgatactccggcgctctccatcctcgagctgcgcgcgaaagctcgccgcgagctgcgcgacaagaagcagggcatgatcgtggtcgactacttgcagcttatgcagccgccccaaacgcgtcgcgacggcaaccgcgccgtcgaggtcggcgagatatcccgtggcctcaaggttcttgcgaaggaaatggatatgccggtcgtggcgctctcgcagctttcgcgtgccgtcgaaatgcgcggcaagaaacgccccatgctttccgacctccgcgaatcgggctcgatcgaacaggacgccgacatcgttgcgttcatcgaccgaagcatggatgagatcgaagccgaaagcgacgatcgccccgacttgggcaccgccgagctgatcgtcgccaagcaccgtaacggtcccacgcgcgatattccgcttgcgttcaatcccgagtttacgaaattcatgaactttgtcgacgattcgcgcgcggccggctacgcgtagccgcactgcgccgactttcgcgctacactgggatcatgcctaaacgcgtcacattcattcatgctgcggatctgcacttgggagctccgttcagaggtttgcgcgcgctttccgacacctgggccgaccgtctgctgtcggcgatccccgaaagctacgaccgcgtgatcgaagctgcggtggaaaacaacgtcgacttcgtggtgatcgcgggcgatatcttcgattcggcccgcgcatcgtatgccgattaccttcatttcttcgatggcctgcatgtgcttgacagggcgggaatcccggcgtacctctgcactggcaaccatgatccgttcacgtcgtggaagcaggatttcttcgcgtttcctccgaacacgttcatgttctcggcggacaagccgagcttcgaggtatacgaacgcgatggcgaaccgctcgtgctgctcggcgggcgcggttactacaaccaaacgtggccgttcgatcgggacatcgcagaaggggtgaaccgcgcggcggccgaggaagccacgaaagccgcagccgcgccgtttgcggtgggcgtgctgcacaccggcttgaacctcgacaacacgaaagccccgaccgacccgactgcgctcatgcgcacgggtatggattactgggcgctcggccatatccacaagcgctatctgtatccagaggataacccgatgctcgtgttttccgggtgcatacaggggcgcgacgtcaacgagacgggagagcggggggtattcaaggtcacgctgaccgaaggagctcccaaccagctcgaattcattcccacggcgagcgtcgtgtggcagaagatgcgcgtcgacgtagaggactgcgcgagcatcgcggaagtgaacgagaagatcatgcgcgagctgttccgcgtgaacgggaaatcgcattgcgaagagatgtgcgtgcgtatcgagcttgtcggcaaaacgcagctgcaccggtttctcgaatcgccttcggtgctcgctgacctgcgaaagagcattaacgacagctacgcgttcttcttttgcgatacgctgaccgatcgaacggaaatgccgatcgataaaaaagccctcgcgggcgaaggcttgttcccggcggtgctcatgcaggtcgcccattctcagaaagagaatgcggaagagagcctgtcgtatctgcaagacgagttcatgaaaaagaacctcacggtgccccgcagcgttgagcgatcgctcgacaagcttgtcgacgaggcggagaatctggtgctcgatcttctcgggcagggcgaggtgcgctgatgaacgagttatcgcatgaagcaccgcacaggatggagccaggcgagggaggatccatcagcagcctgtatgtaagccgcatgaaaattgtgagcttcggctcgttctcgaatcgcgtgatcggtccgtttacgccccacctcaacgtagtccatgggaaaaacgaggcgggcaagaccacgctgaatgcgtttttcgggggagtcctgttcggttgggaagacgcgcgcggggcgaggaacacttacaaacccagcaatgcagagagggcggggtcgatctttttcgccgacgaggaaaccgacgaagagatcgagcttgtgcgcgtgaagaacgccgagggtttgcagggccccgagtatctgctcgacgatatcgataaggaaacgttccagaccatgttcgcgctgacaagcgacgagctgcgcagcctgcgaaacacgacggacgtgaccgcgaagctgctcacggctggctcgggcacgggcgcctccccggcgcaggcgctcggtgagatccagcggcgcatcgcggagtatacctcgcgcgcttcggggatcgatcattccattacgcagctgtccgccgaactcgacgatctgcgcgcgaagatagcccgggccggggatgagtccgaacgattcaagcaccaggataaggaattccacgagcttgctccgcagcgtgaggcgctcatcgcgtcgcttcaaaagctcaacgccgagatagaggcgctttcggcgggcaaggcgagcctcgagaagctcgatgatgagcttgcgcacagccttgacaagcgcaaggaactgctcgaagaggaacggaagctcgttgccgatcatcgtcgtcacgagcaggctatcgaccccgggcttacgtcgatagctcccgcagaagagcactcgctgcgcgatcgcatcgacatgctttccgaagaacgcagcaagtgccagcacagcgtcgatcttgcgaaggaaaactacaccgattcgaaatcgaactacgaggcgcttctcgaggcgcccgatcttcaggagctcgagaaccgggctcgcaggcagcgccatgttcagatcgccctgtcagtcgcccttcccgtgctgttcgtgatagcaggcgtacccgtgttcatgcacgggcgggaaatcacgagcctttcgttcacggcgctcggaatcatcttggtcgtgttcgctcttttcctagcgggcgccgcccttgtcatgctgttcaggccttcgaaaaccgaagaggcgctcacgcagcgcaagcaggatgcgcagtggatcatgctgcaggataaaaagaagctcgaaacctgcgaagagggccttgccgcccagatgatccagaccacgaccttcctcgagcgctcggggctcggcgccgcgcagggttcgcttcgccgcgcacgctccctgctcgacgaagcgagggatgcccgtgccgcttcggggctgttcgtgcagaagcagcaggcgctcgttgcgcagctctcgtccatcgaggatcgcttggccgacatccagagccagaagggcagcttgtacagacgcctcggcctcgccgtcgacacgccgctctccgacattgcgacgcttatcgagcagaaatcccaccagcgctcgggccttatcgagacgagtgagaacgttaaccggcgctacggcgagctcaagcaagagcttgcccatgcgaagcacctgcggaacttcgacgcgctcaagctcgaataccagcaagtgaatacgcaacttgcagaaagcgagcaggatctcgcgcggcttctgcttgccaagcacatgctcgaatcggccatcaccgcatgggaaagcaagagccagcccgaggtgtaccggcaggcaagccgtcttctctcgatgatgacggcgggcgcgtgggtgcaggttcgcatgagcgaggaagggaagctccaggtgatagatcgggtgaaaacggttcgcgagcccatccacttgtcgcttggaacctgccagcagctgtacttgagcctgcgcatagcgctgctcatgacggcggaaaacgtggggcgcgccatccccatcatggccgatgacatcttggtcaatttcgacgaagagcgccggcgcggcgcggttggcgcattgaaggagttgtcggcccgccggcaggtgattctcttcacgtgccacgaggaaattgtaaggctcatgcaggatgccgattcgcagctcaacttggtcgaactgtaatataatcggaatttgctgaggtaaggcgggcgagggcccgcatacgcacgaccggagcggttcgggaaaccccggacgcgaacggccaaggaaaggaacgaacgacatgcccagtacggttctcgtcggcgcccagtggggcgacgaaggaaaaggcaaaatcaccgacatgatttcgagcgattacgattatgtcgtccgttaccaaggggggaacaacgcaggccatacggtcattcacggcgatcgtaagcttgcactgcacctcattccgtcgggcatcatgtacgaaaacgcggtgccggtcatcggcaacggggttgtaatcgatccgggtgtgctcgtcaaagagatggccatgctcgaagcggagggcatctcgtgcgaacgtctgctcatctcatgcgacgctcacgtcatcatgccgtaccacaaagatttcgacggcgccgacgagaagcgcctcggcgaaaacaagatcggaaccaccaagcgcggcatcggcccttgctatcaggataaggctgctcgcaaaggcattcgcatccaggatctgctcgacgagaaaatcttccgcctcaaggtggaaaccgctcttgcgcagaagaaccccgtgctcgagaagatctacggcatgccgacctatacggtcgaggagatctgcgaagaatacctcccctatgcgcgcatcctcaaaccgcacatgaccgaatcggcccaacttttgaacgacgcgctccgtgcgggcaagaacatcctgttcgaaggcgcgcagggaacgctcctcgacatcgatcacggcacgtacccctacgttacctcgtcttcatgctgcgccggcggtgcggcaacgggcagcggcgtgggccctacggccatcgataaggtgctcggtatccagaaggcctacgttacccgcgtgggtggcggccccttcccgaccgagcagcgctatgccgaagacggcggtacgcccgaagaggccgaggtcggcgaaacgctttgcgaagtgggtggcgagttcggcgtgacgacgggtcgcaagcgccgctgcggttggttcgatgcggttatcggacgctacgcggccgaggtcaacggcctgaccgacgtggcgcttaccaagctcgacgtgctttcggcgttcgaaaccatcaaagtatgcgtcgcctacgaatgcgaaggcaaaacctacgattacttccccatgcagcaaagcgtgctcttccacgccaagcccatttacaaggaactaccgggttggaagggcgttgatatcaccggatgcaagacgttcgaggagctccccgaaaatgcccgcgcatacgtggagtacctcgaggagatcacgggcgtgcgcatttcgatcatcgccgtcggccccgaccgcgatcagacgatcctgcgcggttggcaggcgtaatcgaattgtttcacgtgaaacatttgttcgtgtaaagcagtaggaaaggatttgcagtgaacatcttggttttgggaggcggcgggcgcgaacacgcgattgcctgggcgcttgctcaatcaccgaactgcgacgatctgttcgtcgctcccggcaacgggggtacggcgcagattgccgagaacatagccacgctcgacgtcgattcgggtgcagccgtactcgggttctcgcgcgatcacgatatcgatatggtggtgatcggccccgaagccccgctcgtcgcgggcgttgccgatgtgctgcgtgaggcgggcatcgccgtgttcggccccgatgcgcagggcgcgcgcctggagggcagcaagacctacagcaagcagttcatggaagacaacggcatcccgactgcgcgctatgcgagcttcaccgaacttgatcccgctcttgcctacatccgcgaactgggtgcccccatcgtcgtgaaggcagacgggctggctgcgggcaaaggcgttttcgttgccgaaaccgaagaggttgccgaagatgcggtgcgcagctgcttcgatggcgcgttcggcgatgcgggctccacggtgctcatcgaggagtgcctgaccggccccgagtgctcgctgctcgcgttcgttacgaacgggcatgccttctgcatgaccaccgcgcaggatcacaagcgtgcgttcgacggcgatcgcggtccgaacaccggcggtatgggcgtgtattcgccggtgccgatcgtcaccgatgaagagctcgccgaaatgcggcgcatcatggaggttgccgccgcagcgacggcgaaagagccgttcgaacatgactatcgcggcgttctgtacggtgggttcatgctgacccccgaagggccgaaggtccttgaattcaacgcgcgtttcggcgatcccgaaacgcaggttgtgctgccccgccttgaaagcgatctggtcgaggtcatgtacgcggttgcccaggggcgcttcgaggatatcgatcttcgctggtcggatacctgggcggtctgcgttgtgcttgcaagcgaagggtacccgggcgcatacgaaaaaggcaaggtcatcctgggcatcgacgaggcggaagacctcaagggtgtgacggtgttccacgcgggcaccgcgctcaacagcgatggcgagcttatcaccgccggtggccgcgtgctcaacgtggttgcgctcggcgaaagcttcgacgatgcgcgcgaagctgcttacgatgcggtcgatctcatcaacttcgagggcaagcagtaccgaaccgacatcggcaagcgcgcggcatccgggcgcggagcttgggagtaacccgtatgctttccgaacgaatgctttccaccgttgttcgtcaatgcacgaagagctaccttaagctcgagccgaccaatgatgcgtacgttcccgcgcctgcgccgggccagccctatatgctctacatgcacgtgccgttctgcgagaggctctgcccgtactgctcgttcaaccgtttcccctttgacgaagggcgcgcggttccgtatttcgagaacatgcgcaaagagatgctcatgctcaaggatctcgggtacgatttcgaaagcctgtacgtgggcggcggtaccccgaccatcatgatcgacgagctgtgcgatacgatcgatctggcgaaagaaacgttttccatcaaagaggtttcaagcgaaaccaacccgaatcacctcattccgtcgtatctcgataagctgcagggtcgcgtgcagcggctctccgtaggggtgcaaagcttcgatgacggcctgctgaagcagatggatcgctacgataaatacggctgcggcgaagaaattctcgagcgcgtgcgcgaggcgagcccgtatttcacctcgttgaacgtggatatgatattcaacttccccgcgcagaccgaggcgatcctgcgcgccgatctcgagcgcgtgatagaaagcggcacgagtcagacgacgttctatccgctcatggcgtcgccgtcggttgcccgttcgctcaaagcaacggtcggcaaggtggattacacgcgcgagcggaagttctacgagatcatttccgaaacgcttgccgggggatccaacccgctcttcaagcatgggagcgcttggacgttcaacaaggccgaactcgatgagtcgggcgaagacgtcatgatcgacgaatacgtggtggattacgaagagtatcccgccatcggcagcggcggcatcacctacctgggcgaatcgttgtacgtgaacacgttctcggtgcaggaatacaacaaggcgatcgaggcggggcgcatgtcgcttatgggcaagaccacgttctcgaaacatgatcgcatgcgttaccgcttcatgatgcagttgttcggcctgcgcctcgacaagaagcagttcgagaaggattttggatgtacgatcgagcgaggcttgcctgttgagatgacgttcatgaaagcgtgcggagcctttgcgaccgacgatgagaacgagctgacgcttacggcgaaggggcgctatctcatggtggtcatgatgcgccaattcttcatcggagtgaataacctgcgcgatcaagcccgcgcggcgttgacgggagaggagcgcgagctcatcttcggctgacgcacgaatctgcggtcgccgcttcggatgcaggcgagcgagtcgcgcgtgacggctacttgccagccgaatgacaaatgcttgacaaaagggcctcttgcaggctctttttcatctgcggccgtatactctatattccatgtgctcgacaatgcacatgctgcgcgtgagaaacgaaccgaccgaacgggaggcgaaaggtcgtatgttgaacgaaacgcaaatcgacgagttgattgcccacggcatcgactatcgcggcggcgtcgaccgcttcgggggcaattccgccatgttcgagaagttcatctttcgctaccttgacgacgagcattactccctgcttgtcgcagcggttgaagcaggcgatgcggaggaagggtttcgcgtggcccatacgctcaagggcgtggtgggcaacctttcgttctcgtcgtacttcgccgtgctcgatccggtgaccgaatccctccgatcaggcgatttggagtctgctcgccgtttgatgcccaatgtcgaaaaagcccatatggaaacgatagctattttggagcagttgagctaaactagcgtcttcttaattccacgttgtatactaatcgtttacggaagcgatcaagtatacagggagcgaattcgctcttgtggagatggagacgattgctggtttatgcttggccaggataggaataatcggggttttaccctagctgaactgctgctgtcgattgcaatagtcttgattcttgcggccctggtcgccccctccatcgccaatatccaacgcaccgcgcgcatagcgcagctcgattccgccgcaagcgacatcgccgtagccgcccagcagcagatgacttcgatgaaggtgtcgggcacgtggctcgccctgttcgacgacggcggcgtgctggcgggaagccctgcggccacgggggtgccctccgctgtgaccgacagccatcccgtaagcaacgatttgtgctacatgaccgccgatcaggcgcgcagcagcggtgttcttcccgccgactcgatcgattccgaggtgcgcaacggcgatttcatcatcgagtacagcgtttcgacggcaacggtgttcggcgttttctacacggatggcaagacgggcttctttcaagatcagccgatcctcggcgcagcgactcctgcccagacctactacatcgatggcggcgattctgcggtaaagcgaatgcagagcgcgcgcctgcaagccgatccgctcatcggctactacggcgggacgcctgcgggggcaaccaacgcggtagcgcttgccaatccgaccatctgggtcgatgaggaaagcggtctgctgtgcatccaggatacgaacctttcgaagcatggcgaatggttgaccagtctcgaagttctcatcgagaaccaaaagacgggctcgacggcaaccatcgcttttgccgggctgcaaggcggcaaatatgtaggaacgtatcagggaggagctaaaagcgatagccttcttacctaccagaacagcggtgatacgaagctctactcggtaggctaccgttcgcctctcgacgatccgtccttgcccgccgacgtgtacacgttcgacctcgagatgctcaaagcaaccggcgataaaagcctgaatgcccttgcggaaggattctcctacggggatacggtcaaagttacggcaaccgtcaagaccggccaggtggcttacacgccaacctcttcgaccgcctacatcgaatggcccgagcccgtttcgatgttgcgcgttgtggtaaccgatccctcgaacggggagaacgctacgaacggcgagcgcataaccggcacgtatcgaggacccgagatcaggcagattcccaaaagcggggatgaccaggtaaccggattcgacgatctgaaatcgtacgctgaaaagcacaccatcaaaaatacgagcagcacgcttaccggggaaaacgaagaagcggcttaccagcggtacaaaggcgggcagataagctttgcagatgcgcttgcgaatctcgtcgatatcgaagcggcggtggggggatatgcacccgctgacgaggcgggcgaataccgatatcagatttacgagctgtggctcggcgtcggctcggatgctgcggcgagcaagaaacagcgaatcggatacatggttgacaatgaatggaagtgggttgcggccggcgaggcgctgtcttcgtgcataagcggcctgagcgccggtgccgatacggcgggaaccacaacgctttcgatcgatccggtatctttcagcgagaagctgggggaactcggacttgaaaacgaagtgattacgatctacatccgcaccgcgccgagcatcgacgatgtgcgcaagtacattacggggcagtccgatccttacgggcacgacgagagctcgctcggacagataccgaagatagacggggagctcacgggcaacttgacgatgggatcgcgcggaacggaagccgccgcgcagaaggaattccgccgactcttcgaaaacgagttcggatgttcgtcgtctgactgctcgtgggcgttaacgaagaagtcggattcggggcagttcggaaaaaacgggagcaactttccgggcaacgcgaaggatatacgcatctactatgcagtaacgccggcattcgcgttcaatgcaacgattaatgccgccgacaacgaagtgacgaatgcggcattgtggtactactctgcgaaagagaagaccgtctactcgcaggcgatggtgtatccctcgcgcggcgggaacccgtattacatggcttcgacgagaagcagcggtcagataaacgccgatttcgaactgatgaccacaagggactatctgttctaccgcgtcctgaaattctacggggaaacctcgcttgacggcaaaaccattgcgctcgatatggatctccagtacgtgccgttctcgttccagaacgacgcgcgcgttgccacgcttccttacggcaacgcgatcaacgacgaagcaggcaagctcgcgaaggttttttcgcaatgggtcaccaacgatacgaacccgaaaggccgagatccccttgttctcgaggccgatgcgcttcttggaagctatcacgaaagccttgattacataggagcgtctttgtacgccgaatacgtcgatgccggcatcggcatgatgtatttggaatttggcgaaaacgaaacgacgggcgagcaggtaacgggctattcgggctatttgacccccgggcagggaaaggtcgagaacctgcttaccaacgattcgagcataacgagttggggatactatgcgctggttccctcggcattggacacgggccgggcgcccaaggtttcgggcaacgacatgataatctccgccgattcgaagacggtggttatcaaaggcgtttcctaccgggcgtaccaggtgcggccgcggggaaatgcagctaaggcccgcaatctttcgggaacgctgacgcttcccgctctcggcgaccagacgtatgcgtatacgatcaacagcaacttcgcctgcgcagtcgaaatagacgggaacaaggcgcagaactggggcaagtcggaaggaaactcctggcaggtgcgacatgcaacgcagttcatcggagccctatcgcttcttgacaaggttcagcttgcctacgtcggcgactgctttgcgcaaacgcacaccatcgatatgaaagacgtatccgagacggatcccaagctgagcatcaagctcgacaacgtgttcacgggaatctacgatggcggcagcgaagccggaaacgttgtcaaaaacgtgcagtactgcctgacgagctattacgtcatcaacaattcgccgatcgcactcggtcggggaagcggcatgtttccaaaggtcgccggagtgacggttgagggcggggatggctcgacgtcgacgacgaaggcgcaaatcaaaaacatcaaagcggtggtgagcggctcggatttcggcgaaggaagcaagggcgtttacgaatgggccacgcaaagcccctactcccatgtgggggttatcgtaggctatatggaagactgcgacatgagcggctgtgagatcgtgggagatgccgatgacgttccaaccatcaagatggtgtttcggacgacttcgatccgaggatggggtttgatcttcggcggcgcggagaacagcaccgtgtcggattgcgaagtaagctcgatcaacctgatagccacgaggaaaaacagcacccagtgggatggatgggatgaaaacccgaagatgggggctctcggaggccaggccatcgatacgaaaatcacccgatgctccgtgaaaaagacggacatcggcaccgacataaaaacaaaagagcaaaaggagctcgccataggaggcctggtcggtgatatatcgggcggcgagagctcatgcagcaacgttgtgctcgagtcggtcaacttgataatcgcgcccgaacaatacgatgcaaagcgaaaacgcgatctgcatttcggtggattggcgggcaggagcgccgtcgccttcgatgacacgtgctcgtttagccaggttgtgctcaaggtgggagcggttgctgcctacgatgtggttgcggctgcgaacgagatcgtggagagcgtatcggtgatatcggaggaaccggcggcccaagagccgaaaaacgatcccgtcgaagacggcgcttcggatgcgccggaggtcgcgcctttgaccagcgagaccgatggcttgacggatgccgagcaggaagcggcggcgtagcatgggtgcccgtccgacatcgaatgtgaaatcgagccgaagcgccatgagggtgcggcttgcgtgcaagctgcgcgatacgacgggctcgtcgattattctggcgctcgcattctttatcacctgcgcagtcgtcggtgcgattgtgctcatggcagcatcggtgaacacgaaggcgaccatcacgtacgaagaaacgcagcaggccgaatataccgtaacgagcgcggctgattttctaggcggctgcttgtcgggtgcgggagtcgtgtggaagtaccccgaaggttcggaagcccccgatttcagcgaccgtatgagctatgccgatgaggatgggcttatgacggagttatgggataaatacggaagcaagatttgggatagctacaaaaagaacagcgggtttccgatagacgatacgtttacgatcagcgtagatggattcgacaccgtctatgcaagaatctccttcgatgccgatctcaacgtggtggcgcggctgtcgctggcttcggaagccgatgccgtcggcaattacgacgagctggtcaatgtgcaggcgacaccccatttcgataacgcaggaaagctgattgccgtcgactggaacggctacaccgtcgtaaaagccgcctcggcaagcgatccggcttccgtttcgtcgaggggaggcgcaacctcgtgatggcacgatgcgaaaagccgcttccctcccgtcttcgccgggcgctctcgagaaagctctcatcgactgcgggcgatacgctcgtcgagatactcacggctctgctcattagcgtcatggccgttactctcatggcaacgatggtgatgaccgcaacaaacgttacctcgaaaaacgacacgaggatggccgctctgttcgaagctcaaagctccctttccgttccgagcaagaaggatctggtgagcagcgcggctcctgcgacgatatcgggcgggtcgattgattcgataagcatcaaggtcgatatctacggggacgatgcgtttttgcgctatgagctgttcgacaacggcatgatgggtggcagatgagatcggttctcgacatagcgcccaagcttgtccgcaccctgcgcgatcgcgtgggcgatacgcggggcttcacgttggcggagcagctcgtgagcatcgtattcctcggattgctttgcgtcgtaatcggcgtcggcctcaatgccgcgctcaacgcgtatcgcgtggcgaacgaatcgacgcgcgccaacgaactgcttacccgagcggttgaggaagtgagcgacgagcttgcattcgctccttcggtcgagggatcggattcgaaggatccgattacgatagcggattgcaaattcgtgagcccaacgttaaagagaccggtcgtgatcggaaacgatccgaacggcggcggcattacgcttgtcttgcaggagagggaaacgggcacggacggaacggtttccacgccttttccgcgggtgctcgtcgcctcgtcgcatggcctgaccgttcagatatccgatgtggcttttaatgtgaataaagacaataataattatcaatatacttggaattacaccattgcagtcaccctgcaaggaagctcctccgtcatcgcttcgaccagcatgacggttgcgtggacaggataaagaaaatggcatacaaacggcttggcgatttacttaccgatgcggggctgatcagcgatgaacagctcgatttggcgctttcccatcagaagggaacgaaccggcgtttgggcgaggtcctcatcgacgagggcatcatcaccgaagcgcagctcatcgaggcgcttcagatgcagctcggcatcgagttcatcgacctttcccaatacgacatcgatcccgagatgagcagggtcatttcgaagaacgttgcgcgcacgtacagcgtcgtgccggttaaagctacgcccgaagaggtttttctggccatgagcgatccgctcaacttccttgccatcgaagcggtgaagacggcatcgcgcaagcgcgtggttccgatggtcgcgaccaacgatgcgatccagcgcgcaatcatgacactgtacggcaacgagggcgctgcccgcgccatcgaggaaatgcggcgagaagtcaaggcctccgaagacaccgcaacgttcacctcgtcgacgctcggcgacgacgccgatgcgcaaagcgccccgaccgtccggttggtgaacagcattatcgagcgcgctgcgaccgagcgggcaagcgacatccatctcgaaccccgcgaatcggatatgcacgttcgcatgcgcatcgatggaatcatgcgcacgattcttacggtgccgaaagaattgcagcagagcgtgatcgcccgcctgaagatcatgggaaccatgaacacgtcggagcgccgcataccgcaagacggccgcgcgaacgtgcgcatcaagaagcaggacatcgaccttcgcatatcaacgctgcccacgatccacggcgaaaccgtggtcatccgtctgctcgacaaagacgagaagcttctcgaggcggagggcattgggcttgcgggcgaagatcttgcaaaataccgatcgctcatcggcgcaagcaacggcatggttctcatcgtgggccccaccggttcgggcaagagttccaccatgtacacgatgattcgcgagctcaataccgatgcggtcaacctcgttaccctcgaagatcccgtcgagtacaacatcgacggcgtgaaccaggtgcagatcaacgagaaggtgggcatgacgttcgccgagggtctgcgagcggtgctgcgccaggatcccgatatcgttgcggtaggcgagattcgcgatggggagactgccgaaatcgccatgcgatctgcaatcacaggtcacctggtgctctcgacggtccatacctacgacgccgcttcgacaatcgatcgcctcatcgacatcggagtggagccgtacctcatagcgagcggcgtaaggggcatcatttcgcagcggttggttcgctgcgtatgcccgcattgccgcgaggcgtacgatcccgacgaagaggagctcgccttgctcggcttgaccgccgcctccgatgccaaattctatcggggtgcgggctgccccatgtgcttcaacaccggataccgtggacgcacgggcgtgttcgagattctcatactggaccgcgatttgcgctcccgcatcaccggcggcgcgacgcgcgaggccctgcaggatgcgattgaggccaccgggcatcatcaaaacatggatcagggccttcgacggctcgtgcttgcgggagtgaccaccgttgaggaagcacgcaaaacgatgactgcgatggattaggggcgccatgaacatcgtcgatcttataagccgggcacatgacgtcaacgcatccgatatccatctggtgtgcggcctgcctgtaaaattccgcgtcggggcgcgcctcgtttcggcaaccgaggagacgcttacccatgaagattgcgagctgcttgcccgcgatcttgccggtggccgctacgatgccatgaaggacatcggcgagctcgacctggcgcgcacgatagcgggggttcgcatccgcatcaatctgtttcgcgcccaaggaagcgtgagcgctgcactgcgcctgctttccgacgagattcccgatcttgaaacgctcgggttgccgcctgccgtcatggctttcccaagcatgcagcgcggcctgatcgtggttaccggcgaaacgggcagcggcaagtcgacaacgcttgctgcgctgatcgatcggatcaaccatacgagggctgaaaacatcatcacgatggaagaccctatcgagtacgtgtacaagcccgaccagtcgatcgtttcgcagcgagagatcggtcaggataccgagagctaccacgccgctctgcgcgccgtgttgcgcgaagatcccgatatcatcctgatcggcgagatgcgcgatctcgaaaccatccaaacggcgctgacggcggcggaaacggggcacctggtgcttgcgacgctgcatacgaaatcggcggcggattcgatcgaccgcatggtagacgtgtttcccgagggcttgcagcgccagatccgcatgcagctctcgacgtgccttgtcgccgtgctgtcccagcaactgctcccccgtcgcgacgggatggggcgcgctcttgcatgcgagctcatgatggtgactcccgccatccgcaatctcattcgcgaaggaaagacgccccagatcgcaagctctcttgccacctcggcggcggcgggaagcgtgacgatggacaacgcgctcatcaacctttaccgcgcccgggcgatcagcgccgagacggcgagggaaaacgcccatgaccaagactacatggggaagaatacgctgtaatgccgacattcacctacagaggagttaccgacggcggcatgccgaccaccggcgtggttgaggcgttcgacgagatcggagccatggaggcggcacggacccagtgcaggatcgtccaggaagtcaagctcgttcgcaagcacaagaacctgcttgccatggacatcacgaagccgcgcgtaaagctgaagaacctcgccatcatgtgctcgcagttctcgatcattcttgaagcgggccttcccatcgggcgggctgtggcgctcgtagccgagcaaaccaccgataagtacctcaaacgcgtgttgggcgatgtggcttccgacgtagcggcgggccatggatttgccgacagcctcgagagcaagggagacagtcttccgaacatgttcatcgagacggtgcgctcgggcgaagaaagcggtcatttgcccgaagcgttctcccgcctgcactcgtactacgataagcggtcgaaggtcgcggcaaaggttgcgagcgcgctgacctaccccatattcgtcctcatcatcgcggttgtggttgttgcggtcatgatggtcatggtcattccggccatgacgagcatgatctcgtcgcttggttcggatatgcccgcgatcacgcagttcctcatcgacgcttcgacatggacgcagcagaacatcctctgggtcgtcctcgttttggcgctcgttatcgtgggctgcaagctttacggtcgcaccgaagccggcaaaaccctgtatgcggtcatcaaactgaggattccgattttgggagtcgtatcggtgtattcgggtgcggcgcaattcgcaaattcgatgtccacgctcattgcggcgggactgtccatgccacgcgccgtgcaagttaccgcgcgcgtgcttgacaaccatgtgctttccagcgaagtgggcctgatggaagtggggctcaccgagggtaagagtctcggcgaatgcatgggggatgcgcatcacttcccccgtacgttgatcgaaatggcttcggtgggggagcagacgggcgagctcgaggagacgctcgagacggtcggggcgttctacgattcggaaacccagcgcgtgacggatcgggcgctttctttgctcgaaccggcattgctggtgctgatggcgttttttgcaggtttcatcgttgttgcgctgtacctgccgatgttcaccatgtatgcgtcgatgtagcgttgggtcggcttcggccgatgcgggctcgtcgtgcagatagagagggtccggtagaaaatgccgggaagaaagacgttgttcgatcgattggtcgaacgcaaagaaaggaagtgtcatgaaagagatggtcaagcgcatacgcgaggagaagggcggctttacgctcgccgagctcctcatcgtggtggcgattctgctggtgctcatcgccatcgcagtcccgttgttcacgggggctctcggaagggcggaggctgctgttgacagcgcgaaccagagagctgccacctctgaggcgaaagtcgactatcagttgggaaacaagagcggtagcgtaacgtacatatactactacgatggaaacggcaacgagctgacgggatccggcccagatgcaagcgggacggcacccacgggggctgtttacaagtaccagctgacgatcagcaagggagtgacggatgccgacaaaggcgatatcaaaatcgaatacgccgatggcaatggcaaaataaccggttagccgaaggctggcttggcgtttagcaccctaccgaagaccgtatgagcgcatctctgtttgacatagcccccgcactcgcagcgtatctctcgatacttgctgcggtgctgggggcttgcatggggagctttatgaactgcctggcatggcggctcgttgcaggagaaagcgtcttgcgagggcggagccattgcaccgcttgcggcgcgcagcttacggcgatcgatctgattccgatcgtttcgtggtttgccctgcgcggaagatgccgacactgcaagggcaagatctcgcctcggtatgtcgttgtggaaatcgtcatggcggctgtgttcctcagcattgcgctcgagtacgggtttacggtgcaggcgcttgcctatgcggtgcttgcttgcattctgtgcggtgtcacgctcgtcgatgccgatacgtacacgatacccaacggattcgttatagccgggttggcaacctgggcggctacggtttggttcatgagtgttccttcgcagggttttgggccgggaaccatattcgcggcgcagctgggcgaagggtttttggcggtgctcgcagatggcgttgcgggcggtgtgttgctcgggggtgggatacttgcgttctcgctgttgttcgaacaggtgacgaagcgcgattccctcggcggcggagatgtgaagctgttgttcgtggcggggctgttcctcggccttccgctgggattgttcagtttgctgctggcctgttttatcgggttggcgatcgcgtttgttctgaagctttccggcgagccgtcggattcggatgtgcatggcgaatccgatgacggttcaggggagttggaaagcttcagaacaagggcgataccattcggacccgcgattgccgcggcgacgatgctgacgcttttgatagggtccccctgcatggagtggtatgtgggactgctgatgtaatgccgacttgcctgcgcgggcgcttgcaggcacaggggcttatgcgagaaacggataaacgagcgtatgggaaaaacatatacaggagtagacatcggcagcagcacgcttaagatggcggtctgcgatggcgactccataaagaagatcgttttagaagagcttcctgatggcttgatggccgaagggcgcatcacgagctttgaggcgatggccgatttcatcaagtcgtgcgcaaagcgctccgggggaatgacgaagcatgtcgcattcgttatcccccaagtggattgcgtgacccggcgcattcagatgcctgcaatgagcataagggatttggagatgaacctgccctacgagtttcgcgattacatcacgcagggcaaggataagttctattacgattacgccgtagtgggaaccaaggagcaacccgacggcacgcccgaggcgatggatctgctcgccgtcgccgcttcgaagcaggttatcgccgattacgcgcggatgttctcacgtgcgggaatgaagcttgtcgtcgctttgccggtggcggcggcgctgcagaacatcattcggggaaacgctgcggcaaaggcgaattgctgtatcatcgatttttcgcacgcttcgacgcaactgcatttcttcgcgaacggagcctacgatgtatcgcgcgcaatagagatcggcatggtcgatctcgaccgcgctcttggcgaattgcatggcatcgatgcgcatgcggcgagcgggtatcggcgcaggggtcttcgcgatgaaaaggagctccaggctgtgcgcggtgtttgcgaatccattgcggttgaagtgggaagggcgttgagcttctacggcttcaacaatcccgatacgtcgatcgatgccgtttacacctgtgggggaggctcgatggtcgaaccattggtagctacggtggcggaatacatcgatctcgatcagcagtccatcaccgacattcttcctgttgcggcggatggcgcctccttggcgtgccagtgctcggcggctgttggcgctacgatgggaagggggtagccatgaacctgcaaaaagagatatctttcggcgcgcccaaaagggttgattaccccgtgaaaaccgacatcaacctcatgaaagcggaggttacgcggggaaacacgcttgtcaacatccttctgttccttgtgtttttggtgctgctagcgctgttcgtaaagttcgccgttgcggatcccctttcgacgggaatgcaaagcagccaggcccttaccgccgctcaggcgaaactcgatgcgctcaaggcggaaaatgcaagctatacagagttgaaccaggagtactcgaaatacattctcgacgggttgaccgaagaggagatgaaccttgtggatcgcaacgatctgctcgatcttctctcggagacggtcatgcgcgtgactttcgtatcaggggtgaaggtcgtgggcaattccgttgcgatctcatgcataggagtcgacctccaatatctttcggaggtggttcggatactcgatcacgatgagcgcgttgcctacgcaaccgtatcggctgcacaagaggaagacggagcccttcttgcggcaacgattcagatcgtgctcaaagaggcttcggcggccgaagccgatgacgaggcggggcagagcccgtcgccttcggattcgtcgggcgttgatcttgccggtgctctgggggtaacgtcttcggcgggaggagcaagcgatgaaaactagcattttgaacaggtcattctcgacgcgagaaaaaggtttgattctcgcgctggtcatcgtgttgcttgttgccgcctactattttctggttgtgcgcaacgttgccgaaacccaggaagcgaacgcggcggcccttgaggaagtgcagagcgagatcgatgtgcagcttgcgatggctcaggttcgaaccaggatgcaagccgagctcgacgagctcggaacccttgagaggctgcccgaggttgccgtgtacgacaacctcaagaacgtgcttgccgaactcaacaccattctggagcaaacgaagtcgttcaacatcgtcttctccgaaccggaagtcgagggcgagacggtgcgaaggatcgcagatgtcacgttcacggcatcttcttacgaagacgccttttcggtaatcgagcagatgcaaaacggaaggtaccgctgcgatgtgaccgatttcgctttggtggcgacacttgcggcggatggaagcgcgacagctgtgaacgcaacgctcaaagcaacgtatttcgagacgacgaatggggcgcaaaccctgaatggtttggtcgaaaagaccgcatcctgagtggttcctgcggaaatagcttgaccgcatcgcatcgcacaggtaaaataatgccccgcgtctcgaactgaacgtttgagatacgtatatggtcgggtagctcagttggtagagcagcggactgaaaatccgcgtgccgagggttcaagtccccctccgaccaccatgataacgtagggagtgtttgcgctgctcaggactggaattctggttgagcgcaaacactcccttttcaatcacgtattcgtagttttcatcttcggtgccgtttgagccatgctcggtttcgtgaggtcatgattctgcccgctcgtatcgtttcgaactagaaaaaaactcgagcttttggcttgggcttcttcggattgcagttgtttgcgccgcctaaacttacagtgtggtgcattcgggcgcgctttggctggaaatcacggccttgaacaggaaaaatgaatggtctgacctgtggaatcccatattccagaggtttatctgcggatcgggagtatactggagcgattgctgtaaatcagctgccgtgagaaagtggctttttgaaagggtgagggcatggacgtccagtcggtctacgaagcactcggcatcgatttttccgatgtgctcgcccttctgcggaaagaggatcgcatcgctttgtatcttgagcaaacgatgtgcgaccctgcatttcaaacgctcgacgaggccatgtcgcggcaggattgggaagccgcctttcgcgcggcgcacaccattaagggcatggcgctgaacctcatgttggagccgctggcgcatgcggcaatcgacctggtggaatgcctgcgcggcggcgcgcccgacgagcgcgaggcgcgtgagctgtacgatagcctgcgcacgcgcatcgccgacatcgagcggttcatgagctgcgacgcggcaaaggcggcaacgattcccgatctaaatgggtcggctctatgagcgcttcgaaaaagcagaccattctcgttgtggacgacaccgcggtgaaccgcatggttctgtcggatatcctgtccgacgagtacgaggtcatcgaggcgcgcgacggtcttgaggccctgaacatccttcatcgcaaagaaggccagatcgcgctcatgctgctcgatgtggtcatgccgaacatggacggtttcgaagtactcgccttgctgcatcgcaaccagtggagcgccaacgttcccgttatcatcatctcggccgagacgtcgtcaacgtacatccgcaagggtttcgagctgggtgcggtcgattacgtgaaccgcccgttcgaccccgaggtggtgttgcaacgcgtgcgcaacacaatcaccctgtttgcgaaacagggtatcctgcgtgacctcgtggctgatcaggtagccgagcgcgaaaagaccaatacgctcatggtggatatactcagtactattgttgaatttcgcaatggcgaaagcggattgcacgtcacgcgcattcgtatcataaccgaacttctgctcgaggcgatgcagcgcaggttccctgagtacgacctgaccccttcgaagatcgccaatatttcaaatgcggcggcgttgcacgatatcggcaaaatcatcattcccgaagagatactcaacaaaccgggtcgcttgactcccgaagaattcgaagtcatcaaaacgcactctgctgtgggcgacgcaatgctcaaggggcttcatttcggcaaagaggaagaattggtggagtacgcgcgggagatttgccgttggcaccacgagcgatgggacggggaagggtatcccgatggtctcgttggcgaccaaatacccgtggccgcccaagcggtggcacttgcggatgtatacgatgcgctcgtgagcgagcgcgtatacaaagcggcatactcgcatgagaaggctatctccatgatcaagggtggcgaatgcggtgcattcaatcccgacctcatgcagtgcttcgtcgacgaagccgacaatctgaacgaaatgattgagatacgcagcgacagcgcggccaaactgttcgacgtcgaccaattgtcctcggagttgatcgagcggaagagcccggggctttcggacaaaacggtatcgctgctcaagcgcgagcgcaccaagctcgtgctgttctccgagatgaccgaaggcgtcctgttcgattacgactatgaaagcgatacggtgttgctttcaggtcgcgacgcctcgcggtacggctatcctcagatcatggcgggcggcgagcagaagtcccttgcctagatgtcggaagatccctgcgtgatgctcatcagagagtatcttgaagcgatgaagccctgcgattcggtgctcagcatgaacgtcgattacgtgttccccgatggggtacgtcgatcatgcgagatcagaagcaccgtcatgtggagcgaggacgaagaagaatgccgaaagctcggggtgcttggtcgcatcctcccggcgggcgacctgcaatgagcgatcaggaaagccctcgacctgcgaggcgttttgctcggttccccaaagtggcctcgtacgcagtcgtcggcgtgctcgcggtatcgttgatgataggcggctattggctgtaccgtcaaagcgtgacgcaggcggtgaacgccaccaccacgtcgttcatgagccagattgccgatcacgatgcgcaaagtatttacaaccagatcgaccatcagtggagttcgctcgaatcgctcgtcgaccgcctgctcactacgcgcgaagacgatctgggtgagttgtcgtaccagctcagcgtcgagtcgcagacgtcttcgttcaccaagctctacctggttgctgcggacggagccgtccatgacagcgctttgtttaccacagagctcgataaaaagagctgggcggacgtgtaccgttcgaccgaaacgcgttcggtgatgcgctacgatttgaacgaacccgagctgtggggcgaattcgtcatgtacacggtgaagctggagaagcccatgatgtgcgaaggcgagctcatcgagggcattgtcggcctgtccccggtgcaggacatggaagagggcctgcggttcgagagcttcgacgggaggggcgtcgccatcgtcgtccaatcttcgggcgacgtggtgacggcgagcgaatactatcgaagcgacgatggcgagaacttcttcgaccagctggaaggggccacgttcgtgtcgggctcgtacgacggcatgcgcgcctccatcgaaggcggcaaagatgcggtcatcgagtacgaagccgatgacgggcgctactacgcgtccatcatgcccatccgcgacagcgactggtaccttgccgtcaaggtgaattcgtcggttgcgtccgatcaggtcaacgagctgttgtcccgctcactcgtgttcttcgccgtcatgggcgggctcgttgcggcggtggcggtggtcatcgtgcgctcggtgcgcgatgcgcgcgtggcacgcgcttccgagcaggcgaaatccacgttcctcgccaacatgagccacgaaatcagaacgccgctcaacggtttggtggggctgcagtacctcatgcgacagaacatcgacgaccgcgagcggcttgtcgaatacctcgaccaggccgatgcgtcggcgacgttcctcaagagcatcatcaccgacgtgttggacatgtcgaaaatcgagagcggccagatgggcctgtacgcgaagcccttcgagcttccctcgctcatgtgcgatatcgagtccatgatgatgccgcagatgaaaacccgatcgctcaatttcgtcatcgacgccgcgggggtcttcgctcccgacgtggtgggggacgagatgcgcatcaagcagatcatcgtgaacctgctgggcaattcggtcaaattcacgtccgagggcggcgacgtcaccctctcggtttcgcagcgtgcgggcggcagcggtgcgcccatcacggaattccgcgtgagcgacaccgggtgcggcatgagcgccgacttcctttcgcgcatttgggagccgttcgaacaagagcagcgtgcggcttcgcagaacggcaccggattgggcacggctctgtccaagatactcgccgaggccatgggcggcaccatcggcgtcgagagcacggagggggtgggcacgacgttcaccgtgtcgttgccgttgccggtctccgatgaggaaccgcctgtttccgcatccgaggaagccgtccctgccgatacgcttgagggccgccatgtgctcgtggctgaggacaacgccgtgaaccgcatgattatcgtggacatcctcaccgacgagggatgcgaagtggtcgaagcgaacgacggtcgcgccgccctcgatgccttcaaggcaagcgaggaaggcgccttcgacgtcgtgctcatggacttgcagatgcccgagatggacggctacgaggcggccgcggccatacgcgcgctttctcggggggacgcgaagagcgttcccatcatcgcgctcaccgcgaacgcattccgagaggacgttgcgcgcgcgttggatcacggcatgaacgacgtggtgacgaagccgctcgatgtgtcgttgttgttggagaagctcaaagcgctcggctcgaactagattgcgaagaagggaagttggcatgagaggaacgaaagcgttaggcctggcactatgcgcggcattgtgctgcgggatcgtcggctgcagcagcgggcagtccgaagcgccggtcgtagagaagaagcagatcacccttaatgtgaaatgcccgccgttagcgcttgccttcgacgccggtcactccgattccgaagcgatcgacctgctgaaagaagcaggagaagcgttctgcgcttcctacgaagatgccgaggtgaccatcaactacacgcgcttcccgtatccggaggaaggcgaggcggtgttgggatcgttcggcaccgacaaagcggtcgacgtggtgttgggagggcagttcaacgtgcccacctacgtgcactcgggtcgtgcggctgcgctcgacgacatcatcgacgatgggctgcggtccgacatcgaccaatccatctgggaccagtgctccgacggcgggaaaacctatgtgcttccgttgtaccagttgcagaacacgctgatggtgaaccccgagcttctgcgcgatgcggagcttgaacggtttatccctgctgatgggacggttgcgcaatggtctaccgacgagttcaaagagatcgtcgccggcctcaaggaatcgatggacgatggggagacgttccccctggctttatgggcatcaaacaaccaaggtgacacccacatcatgtcgctgctgcgctcgcatgggttaaacctgtttgacgatcagggtcgcttccaggtgaacacgccggaaggcattgcggcgcttacctggctcaacgaactcaacgaagaaggcatggtgccgaaggggtgcgagaacctggaatacgcttcggctgtcgatcttttcgacaacggccagattgccatctgccccggcaataagaccaccatgctcgccgagcgcgctgccgatttcgagccgttcgccgcgaatttccccacgcctgatggcaagggttgcgctacgacgttcctaacagggttcaccgtgtttgacaacgacgacgccgatcgcgtccaggtggccaaagatttcgtgcgcttcatctacagtgacgatgcctacttgcagtacgcgttgtccggcacgccggtgagcgcgtcgtttatcgagcgcaacgagagcaccggcgagtccgccgagctcgacaaggagttcagcgccaactccgagaacgtgtacgacttcttgaacaacacgccgaactgggacggcgtgcgcagccagttctacctcagcattcaggatatgctgcgcggctcgatcacccctgaagaagctgcggcgaacattgacgagacgtgcaacgccgctatcgacgaagggtacgccgccgcgggaggtgcgtaatcggactcgtcttatagggccaatcgggagaggcaatcgcgaaaggagaaacgcgacgaggcgccgaacgtttgcgcaaaagctcgtggctccccatgtttccagcgatgcggatgcggatctggtgcaagaggcttcgagcgggcctttcccgaggtctgtttcttgtccaatacgccttggatgtttggagtcatgcagtgtgctatagtttccctcatggagaagctgcttaacaaattcacgggtaacatatcccccgtagctctcttggtgtcgtccttctactggtcgtggttcgacgtcgttcctttcagccctgcgcttttttatgccgcaggggtgcccgtcgatacgcttccccttacgctttctttggcggtaagcgtggtggtgttgggcgtgctggccgtgcagccgcagcttcggatggccgttactcgcgccgatgtctttgcggtcagctctcttgtgtgcggagcgggcggatctcttctcgtgtattcaggcgcgctaacggcatccctgcccttgttgattgcaggatctttgctgatcggcgtgtatcagggaatgggcatcctcgccgtcgggtgcctcatcacgtgccaagggaccacgaacgctcttgtgcacattgccaccgctttgccgttcaacatactggcgattcttctcgtcatgttccttcagccgctcccctcggcggtgttcgccttcctgttgccgctctgctcttcctgctgctatgccgtgttttcggtgcgcaagcgaaacagggcgcttgtggacgcgcttgtcatcgagggccgaaagcgcgaaaaagccgccatctcgaaccgcggcagaaggttcgcgcggtacaacccgtactttctcgccatcctgctggtcgtgtgcagctcgttcggcttcgttaactacagaaccgtgttcgtcggcggtgcaggcgaaggggccttcgattacctttcccttgcaattcgcgccgtagtcagcttagcggtgctcgtggggtacattcgctattcccagcgtccctattccattctgcgaatcgctctcctgctcatggttctggggcttttcgccacgccacctctcgccatgctcgattcttccgactccctgttgcccgaggggttgttccttgcaggatatgcgtgcttcgatttggtcatttgggcgattatcatcatattgagcggcaaggcgaacatgtcgatcctcaaaacgatctgcgttgtcgatacggttgatcagctggggatctttttgggcacgttgctgggagcttggtacggcgagggcaatacggctttggtggcctgcatcgtgttcggcgggttgctgctcgtgctcatgctcggctttaccgaaaagaaagatcctgtgaacgacgatctgagcgcgctcgaggttgaattcgcccttgccgcagacgccgcggaagaacgcggtgcgccgcaagagcgggctgtgccggcgatgccttctgcttcggaaagcgcgatcgcggcgcttgcggaccggcactttctcacgaagcgcgaagcggaagtgctctcctttctcgtcgcagggcgaagcggcccctatatttccgagcagctttgcgtgtccgacaataccgtcaagagccatgtgcgccacatctacaccaagctcgacgtgcacaaccgccaagagctcatcgatctcgtcatgcatcagtagcgctgcgtctgtttctcgccccgtttcacctcccttctcatcacaaacgggtgatttatggaaaaacgcccgcaagtgatgaagaaacccatgatgagatttcattcaatgggggcaggccgtcgtcctcgtatccgaggtgcggcctacagggaaggaatcaaggagaagggaacaatcatgaaagaagaagctcggagtagtgtacccaggcgcatggcgatgcttgtcgcgttggcggttgtcgcggttctgtcgctcggtctgcttgcggcatgcggctcgaacggatcgggttcatcgggcggaggcggtgcggccgcaaccgacgaaacgaccatgaccacgaaaacgcttgtgaagacggctgccaacgaactggcgctcgtcgattgggacgttacggatgcggatagcccgctcaccatttccagcgacgatccgaagtacgccgagtacgtcgaagatctgagcaagctgaccggctacaacatcgaaagcctcaccatgcaagtaagcatcacgacggttcagggtgcggaaatcggcgcgacgcacgaattcacgtacgagaacacctatacggtcgacagccttgaagcggtcgtcgattcgaagaccatcacctataaagacggcgatttcaagtagtcgcccgcgaaaaagaaaaccgttggtgctaagaaaaccgttggtgctgcgattcggttcgcggcgtgaaattgaaagagggaaatacaatggctaaactttcaagaaggaatttcttgctgggtgcaggtgctgctggtgcggctttggcgatgagcacggttggaggcgtggcgtttgccgccgacaagaagtctgaagaaggggattgggcgaaccaggtaaccgaagagatctcgtgcgatatcctggttatcggcggaggcctttcgggcgtatgcgctgccgtgcaggcgggcgagaacggcgataacgttctcttgatcgaaggccagcccgcgctgggcggcaacggaacgggcgtggagtgcacgaacgcctacggtctgcatcccaattcggcggatgtgacgcttggcgaaatggttgctttcgaggttaaatctcaggcgtacaccatcaacccgctgctggttcacgatatggtgggccatgccgccgataacgtgcagtggctcattgacaacggggtggagtacgaggctatcgaggatctcgatccggcatatctcgaaatgtacaaggcggggcgctatcgcgcagaatacagcttcgatttcgtatacaaaggcggcgccgcaggcgtgggctatttcccggccatgaaggcgaagctgcaggagtacggcgtgaacttgcgcctgggaacgcgcggtcgcgatctcgtcctcgatgattcgggcaacgtggtcggtgcatacgcaaccgattcctacggcgatacgatcaagatcaacgcgaaggcgatcatcattgcgacaggcggtttcggtgaagacgccgaacggatgggcaagcagggcgtcgatctcacggacatccgcatcatcggtacgccggggcactacggagacggcgttaccatggcgatcaacgcgggcggcatcgagcatggggctcctgcgttcggctgcacgaacatcatcggctcggctggaccctgggggccgatttgggacaagctgtgctggggcgggccgagcttgtgggtggacatccacggcgagcgcttctccgacgaggcatgctcggcttatacgcacaacatggaacttcagaacgttcccgtgcgcttgaacggcggcacgtgctggaccatcatggactcgaagattctcgaaacgatgctcgacggcgacgaagaggcggctcagttgtgggacgagatgatcgagaagggcgacgatgcgtacaaggccgacaccatcgaagaactcgtggacatcatgggcgtcgacaaggagcttttcctcgagaacgtgaagacttacaacgatcatgcggcgaagggcctcgatgccgactacggtaaggatccccagtacctgatggagatttcgacgcctccgttctactgcggtctcatccgcggtgcgcttgaggggctgtactccggcggagtcaagaccgatcgtcagttccgcgtgaagaagccgggacgcgatcaggcattcgaaaacctatttgcggtcggcgccgacggcggcatgctgtacaaccacgtgtacggcctcgacatcaacggctcgatgagctgccacggcatcaacagcgcacgcaccgctgcgaacacggctcacgaatacctgagcggtaagtaggcaggcgaaccggaaaggcaacgagtctgctgcccgaacaagcgcgctcccgaaccggatgttcgggagcgcgtgcgtttactcgggaacgcgcgagacgtcacaaggcgatgctgcgtccgcgcgggccgctgttgcggggcggccatggtctttcttgctacgcgccgtagatcgtttccgtgctggtcgaatcgtcggcattcggtgtcgcatggatcctgtcgcagctcctttccatgggtcggctggctgtgtcgcaattccggcgacggaacaaggctgatttgcacgaaaattgccagattcatacatctttggactctcaggggtggattctgcgaaagcgtgcaaacgcgcagggccttgaacaggcattatcgaaaaagacgtcggaaggctgtgttgatgcgacggcatgggtgtatgaatctggcaattttcgtgcaaatggaggcttccgaggtgcagcggagtttacctgctatactatccaaccgtgcttgggcgctgcagcgtcgagcacccgcgttggcatcgatgggccctgctctcgcggtttatcagttgcccataaccctcggcatgcgccgtgaggaaaaaggagaataccgtgagaaacaagaagacgtcctacgtcgctcaggcgggcatgatcgccgccgtctacgcggcggcaactctcatcaccatgttcctgttgcaggggcttgcctgggggccggtccagttccgcatttccgaagcggttaccgtgctcgccgtgctgactccggcggccgttcccggtctgaccatcggctgcgtggttgccaaccttatctcgctcgcgataaacggcacgggtgcgctcgggctgctcgatgtggtgttcggaagcttggcaacgtgccttggcgcgctgtggtgctggaagtttcgcagccgtcccaaaatcgcgctcttggggccggtgatcgccaacgcgcttatcgtgcccgcttatttgccgattctgcttcaaggcatcggttggtatacgattcccttcaccgatatcagcctcgacggcgcttaccttcccatgtatgtgttcggcgtgtttgccacgggcatcggacaggcgctggtggtgtatgtgctggggttgccgcttctgaaagcgctcaagcggtttgccgtggcggacgatcgtcgcgcgtcttgaggttgaggcggactgctgtttcgatgaatagcggcgttgcgatttgcaaaacggatacaatatctgcgtatatccaacgttaaaaggaagcgaatgaatccggttatcgtcatcccgacctatatatcggcgcgccgcagaaaagaaggcggcaacatccttgccacatacgaccacacgactccgcttacccagcaaggcgaattgggccgttgcttggattcgttgcagaaggtgcagggtctcgggcagattgtgatccttgttgtcagcgagccttcgattgaaaatcaggcagccgaaaaggtacaggcgatagcctctcagttcccgagcctcaacattgtcgtcatcggagctcccgagcatgcgctgatccagcagcgcatggagcagctcggccttggtcgcctgaacaaggaaatcgggctttccggttatggtgcggttcgcaatctcggtttggtcgttgccaacacgctcggcttcgatgcggtggttttcgttgacgatgacgaaatcatcgaggatgccggctttcttcaaaaggcgatgtacggtatcgggaagcttacgaagaagggcattccgatccttgccaagacgggcttttacttcaattcggagggcaactacctctcgaagagcatggataagtggtacaaccacttctggcagcagggcaaggcgttcaacaaatggatctcgaaagccatgcaggggcctcgtttgtcccgttcgaaccatgtgtgcggggggtgcctgacacttcataaagaagcgttcaagcgcgtgagcttcgatccgtggattccgcgcggggaagacctcgactacctgctcggcctgcgtatgtacggttccgacatctggtttgacaaccagtggagccttctgcatttgcctcccgagaccccgagcgagggaacgcggttcaggcaggacatcttccgttggctctacgagtatcgcaagatggaatacagtcgcactcagatcgatctcatgcaggtgaagccatcttcgctcgagccgtatcccggacctttcttggagcctggcattcgcaaccgcatccgcacgacagcgtttttgcgcagcttggcgcgccccgacaagaaggcgtaccgcaaggcggcgaaagcggcgacgggcgaggccatgacgtacgcgcagcgcaactgttcgaagtacttcgagttccaattcgtgtggcccgaactcatggcacgtgtcgagaacgacaagatactgcgaacggccttgctgcaatcggcggccaaccgccaggcgagcggcgccgcgcaagcggggcagcagccctcccgccaggcgagcgttccgccggcaaacgttgcggcggctggcatcgatcccggatccacgacggagatccgcctcaacatcgccgactagcaccgaaagggcaacgatcccgtgacggtgggcgaagcgcaaatgcgccagtggcacaatcgaagatgcgccgcatgctctgaaccgcaggggctgtagcggcgcagcccttttgagataagatcaccatgcagctgttgaaagaagcgattactcgatggacattttcgtagcgtacattgcgccagtgctcgttggcatcggcatcggaatattgtcgggcatgctcggcatcggcggcggcaccgtcatggtgccgatatttcgtctagccttcgacatgagcgccatcatgtccaccgcaacttcgctgttcaccatcattcctacgtctatctcgggggcggtttcgcatattcgcgcgaagacgtgcatcgtctcgctcggcgttgcggcgggcatcggcggcgcgtgcacatcgcctttgggcgtatggctcgcgacggtttctcccccttggctgatcatggcagctgctgcgatcatcatcggctattcggccatcagcatgctgcgcaaagcgcttaagatgaagcctgccaaggctccagtggtttcggatgaggccgaggccgttcaaggggaggcggcggatgccgtcgacggcaagctgactcgcaaacagcttctgatcggagccgggatcggcctgggtgcagggctggcctcgggatacgttggcgtaggcggcggcttcatcatggttcccctcatgctttcgctcatcggcatctctatgaaaaaggcctcgggtacctcgctcatcgcggtaatgatccttgcgattcccggtgtcatcgagcagggaatactcggcaatatcaattatacggcaggcatcatggtggcaatcggctccattcccggcgcggttatcggagcgcgccttgtccgcaaggtgccagagcgtatactgagattcatcttcggcggcttcctcatcgttgcggcgaccatgctcgttttgaacgagacgggcgtcattgcgtagtcgactcagggcgcggccgacaagcacggtattggaggacgcccctatggcccagaataagaaatccggaaaaaaccggcaatcatcgacgttgccccgtttcttcacgcttgagatgctcatgttcactttcgtggtgctttcgggcttcgccttgctctggtcgatcgccatgcctatcaagaacatcggcatcatggtgggcgcgggcatcgtgttcacgttttcgctcgtggtggtcatccggttgctcatggatcccgacaacgtgcgggctcggcagtccgatgcgatgctgaagcttgcaagccagacgcttgcctgcatgaaggaaggcctgaacaaatcgtcggcgcagaaggtatgccggctgctgcttccttcgacggcggcgattgcggttgccataaccgataaagaccagatcctcggctacgcaggcagcgaggaggagcgtaatcccacgggcagcgaggttcgcacccatgcaacccatgcgacgcttgaagacggaaaaatgcgcatcctcttgaccgctgaagacatcgggttccccacggagacgagcatcaaggccgccatcatcgtgccgcttgccatgggcgggcatgttgagggaacgctcaagttctactaccgccgcccgcatcacatcagcgaaacccagaaatccatcgccgagggcttcggcaagctgctttcgactcagatggcggcagccgcgctcgaacagcagacgaaacttgcaacgagcatggagctcaaggcgctgcaaagccagatcaacccgcactttctgttcaataccatcaacacgatcgcgtcgctcatccgaacaaaccccgaaaaagcgcgcattctgcttcgggaattcgccgtgttctatcgccgaacgctcgaggattcggccgagttgattttgtttgcgcgcgaactcgagcaaaccctgcgctacttctcgttcgaggtggcccgcttcggcgaagaccgtgtttcgatcgatgtcgacgtggagccggaagtcgaggacatgatggttcccccgttcttgatccagccgcttgttgaaaacgccgtacgccatgccatgccgtccgagggtatgctcgaaatagaggtgaccggcacgcgcgaaggcgacgatgtgcttgtgtgcgtgaaggacaacggcgtcggtatgaccgaagaggctcgtcaaaacatcctccatccccattcctcgaaggggctcggcattgcggtgaagaacgtgaacgacaggattcgcgggcatttcggtccggggacgcatatggaaatcgaaagcgagcttggcaggggaaccgttgtgacgcttgttctgaagaacggcgcgatccgcgatttcccgtcgcttggggatagccaatagcgacggcggaaaggctgcgggcgcttccgatcagcctgaaatcgaatcggaagggcgcgtcctttgcgtttcaggctgccggcaaaccctgcatgcgggacacgccagtgacttgccccgttcgcagcgctattctgatcatgcgcggcttgcgccgcctgctgcgtaagtgtatgtcgaaacggaaggacgctgatcatgagagagttgagcgacgaaaaaacgctgttcgcctttgcgcgggatttggagccggctatgacggtcgagtcgggcgaaatcgtgcgcattcgcacgaaggattgcttcggcaatcagattcgcgcggcggaggacgtgctcgacgagatcgattgggatgcgatcaaccctgcgacgggcccgatttatgtacagggtgcccagccgggcggcgctcttaaggttgaaatcctcgatatcgaactcgacgggcaaaccgtttcgtgcacgggcaaggacgaaggcgtgtgcggcgacatgttcgaggcgtggagcactcacctgtgcgccatcgaggacgggaagctcatctggaacgacaatctttcgattccgctcaaccccatgatcggcgtgatcggcgtggctcctgcgggcgagccggtgaactgcggaacgcccggctctcacggcggcaacatggacaacaccgccatcacaacaggtgcgaagctttacttccccgtggcggccgagggcgcgctgttcggatgcggcgatatgcacgcggcgatgggcgacggcgaagtgagcgtttcgggtgccgaggttgcggggtgggcaaccgtgcggcttacggctctgcccgagatgcaggtgaaaaatccgctcatcgaaaacgagacccaaataggcgtgatcgcttcggctgaaacgctcgacgaggccgcatcgatcgccgtgcacgatatggtcgagctggtaagcgccaagacgggcgcggcaaaagacgagctcgtcatgctcttctcgcttgtggccgatgtgaaggtgtgccaaatggtcgaccccgaaaagacagtgcgcttcatggtgccgaagtacgcgcttgagacgtatgggtttgcgctgtaggaaagtgatctgcagcgcctttgacgctacttgccgacgcttttcttcaatgtatgcgattctcaaaagatgggacgatcttgctctataatggggcttgttgcatcagccttagcgcacgagttggaggcaccatgctaaaagcaatgatcgtagacgacgaagcgcccgcgcggtcagaactcaagtacctgctggacgaactcggacagaccgaagtggtcgccgaggctgccagcgtgcgcgaggccatcgaaaagctcaaagaatatccgtgcgatgttatgtttctcgatgtgaacatgcccgaggcaacaggccttcagctggccgaagccctgcagcacttgaagttcccgcccgccgtcgtgttcgtaacggcatacagcgagttcgcactcgatgcattcaaggtgaatgcgatcgactatctggtgaagcccgttgaaacggagcgcctgtcgcaggctatcgcccgtgtgcgcgagcacgtttcgcttcatatgaaggcgcagcgttccgagcgcattccggttgaaaagggcggtaagaaaatcctcatcggcatcgacaagatccggttcgtcatggcgcgcgacgattacgcgtatctgcaaaccgataccgatcgctatttttcgacggtcagcctggctcagcttgagaagcgcttggacggccacgggttcttccgcgtgcatcgcggctatctcgtgaacctttcgcttgtcgaagagatcgaatcggtctcaggtggaacgcttctgctgacgctcgacggcaccgacgagaagatccccgtatcgcgccgtcgcgtttcggcgctgaagaaagcgctggggctgtaataccaggttaatcagcaagggggccgcaacgtggctcccttctcgcattttgggccagcacaaaggcattgatgctggtcgttgggcttgttttctctttgtctatccggctttcttcggcctcccgcaaagaagcaggcggcgtgcaaaccgacggaagccgttcgttcgaatcagctcgtcttgaatcggggtttcgcgtctagccttttcggggtgggttacttttccctctgcgtaaggttcggaggccggcgattccgcgcgaatccgagaaacacaacggctgacacaatcggaagcacggcgaagcacagatacatgcccgaatagcccagtgctgccgctatccagcccgatgccacggatccgaccccgatgcccccatcgaagccgacgaggaacgtggcgtttgcggctccacggtgctctggttcggcatcggctaccgccatggtttgcagcgtcgattggcatcccgcaaagccgaagccgtacaagaaagcggtcaggatgaacatcgggagcgtgtgcgccagggacaaaacaacgagtgcagtggcaacgagcgcgattcccggcagcagaacgactgcatagccgcgttggtcgacgaacttaccgagcagcggtcgcgataaggcaacggcaatcgcgtaagcggtgaagaagaacccgatgccctcgacgccttgcgattcggcatggatggcaagaaaggttacgagcgatccgtagcacgaggtgagaaagaacatgatcgttgcaggtagaatggatgagcggttgaacatcgaactcggcttgaacgaagccgtcttctttatcggtcggtacttgaggatgctggcgagcacgaatgccatagccagcacgccgaccgctacggcgacgacgtacgtcatgccgcttgcatgaaacagctccaacgcaatgccgggagcgatggcgaacgcaaggctcgctgaaagcgcgaacaagcccatgccttcgccgaatcgctttggaggtatgatgtcgcttgcgacggtttggcttgaggtgcttgtgatgccccaggcaagaccatggacgaacctcattgctaaaatgatgcccacaatgggaatgaacgcaaacgaggccgaggcgagccccatgaacgcaatgcctgcgagaaagatccccttgcggccgaatcgatcgaggatgatgccgcagaacggacggatcaacagcgccgatatggtggtgatggcggtcacccagccgaggacggtatcatctgcccccagcgtttgcaggtagaccggcagcacgaacggcagcgtttgccaactgctgaaaaccaaaaagttcacagcggcgataaggatgaaatcctttgtccagagttgttgcttcgacaagtcttcttccatggctaccggcctccttcgccagcgtatgccatggtagcacgggcaggtgcggagtgtgccctgatgttgggaagcctcggctgaagtgcggagctttcgccgcggcgggccctgcgcagaggtgcgggctgcgtgggggaatgcgggttcgcgggttcgatttgcggatgggcggcatgcggcgattcggtcagcctcctcctttcatgctgcccgacgcagctggttttacaggccgaaagtcgattttttgccgaaaataaccgatctgaagagatttgacgggttgcgaaagctttagacggcttctgcggaaacctgatgaagctcccccgatgcgaagagatgacgatatggcgttgtgacctggtgcttcttgatggaagaaaagaacttgtcaaaacatgcttcgccgccttctggcgaagtccttcagatcggtccttttcggcaaatctaacgtatctggtctatagaattcgcgaagatcgcgtttcgggcgcaattgcacgtgttccggcgcgcgaaagcccgatcgctttgccgttcgggatcggttctggttgaattctaaccagcagaaataggcgccgctcgagcagtggtcttctcgggcggcgccttgggatcttggaatgctccgaaggctagccgattgccaaaacgtcttcttcggtgatgggcttcgaagcctcgagcttaccgcccgttgcggcttggatgccgcagatgcgaccggtcataatgcagtggccggccgacatgccgctctgatacatcgaccagtcggggctgccgcacagctggccggcgctgaacccggtaacccacaggttcggaatgacatcgccgttcttattcagcgcctggtagttttcatttactgtaacacctgcgcacagggcggaaacgcgtacgtgcttgtggatgccccagaacggagctttctcgattttcttcatatacttttgcgctttgccgaaatcggcgtcgaatcccgcatcgcacagctcgttgtaccgctcgaccgatttcttcagggcgtcggcggggatgccgagtttttctgcgagttcgtcgagggtgtcgcagcagtaggtgtcgatgagcccttcgatgacgtttgccccgctctctgccgagcgatccatctcgacgtcgggcatgtagggcttcatcttctctttttcggtcggttttccgccccagtcggtgacggtctcaaagtagttgtcatcgaagatctgggagtaccagccgggtttcggctgattgcgcagcacgcagttgatctcttcgaatacgcagtcttcgttcatgaagcgatcgccgttttcgtttacgttgaggaacggctcgttgtacatggggcccgaatcgaaatcgtgcatcatgtgcgagtgcccgacggggacgaagccggctccgatcgccatgctcataagaatgccgtcgcctgttttgttcacctgcttgcggtcgaattccttgacgtcgggacagtaacgctcgacgaggctttggttattctggtaatcgcctgtggaaaggatgacgcccttagtggcattgaatttgatgtagctgtttcccgattttccgataatgcccgttacggcgccggattcatcggttacgagctgcacgcctggggtcgaatagaaaatttcgacgccctgcgcggctgcataatcggcaagatgctcgatcatggtgccgttgttgtacggcttgggtccgaacatgatgctgcgtctcgagcacttgctgccgtcgtcgtaggtggtcactgcggtcggatgtactttgtagggagggaatcccgcttcggcgctgcgtacctgaagccaacggatcgattcgccggaatacttgcagtacgtttcggcgagtccgcgatcggcgcgccagcggcaagcttcgaggtagccctgcaggtagttcgccacaccctgctcgtcgctttcgtcgagcagcactcccgagcatcttcctccctgagcgatggccttcgattccttttggagcagtgcgacggtcgccccttcttcaagcgcggagagcgccgctggaacgccgccggtaccggcgcctacaaccaccacgtcgtaggttttctcttcggcgaattcggtgatgggggcaagctccgccgccgatgcttcgaagtcttgcgcagtcaagccgtcgggatactgcattccgtttgcgtcagatacagcgttcgcgtcgccgtcgttggttggtgagcagccgaccatgcttgcacccgcggcggcggccccggcaacgagtgcgcctttgagaaaatcgcgtcgattgagttccatgatagaaccatcccttccttggtgtttttctcgcctacggattgcgacgggcttccgatggccgattaccgcgacaagctttcgactcggttgcgcaaatgccgaatccgctcttcaaacctatcaagcggaaaggattttttcctaccacaaacggtatgaagttgccgcggtcgaacgtttctgcagctgttttctggtatatatgtctttgggaggaaagatgatcaaacgcttcgcaagcacatccgtgcatataggggtagccgtcatcggctttgcctgtgcgctgctggttctcgaaatccagaggatgcccgccgtccagcatgtcaacttctccatgttcgcgcctgctccttatttcgttgaggttgttttcatccttgttcttgcagcggtttacggtgcgaagaagaccctgagaatttcagcttcgccagttgcccgtgcgggaatcgctgctttcgcggcggtcttttcccttgtggtggcatccggcgtttccctgccaggcgaagcggccgtgcttgtgatccaatcgctgtatcggatcggaagcgcttgtcttttgctgttttggggtgagcgtcttgtcgggcttggtgctcggaggtctgcgctggtgtttgtggctgcgtgctttgtctcaggagcgattacgctggtactctcggtgcttgatcaaagcgtttcgtatctgatcgtatgtgcgcttccgatcgtttccggcgcagggttcatcttctatgtgccgaaggtggtcatacctggcgaaggaactgaggccgatgctgaaaacgacgagaagctagcccaaacgctaccgcggttctcctgcgcaagcaaacgggaaacggcagttgccttcggcttgattgctttgccccttttgtgccgcgggccgttcgtgtcgatccaatcggcgtggatgccgttccaagaagattccctcatcacgtttctcattcagctcagcatcgggtgcggagtgctgattgccgcagcggttgccttgcttgttgttttgcgggtgtggaaccgtaacttcatcctcgtgttcgagcttttcgtgctgcctataacttttcttgcgctctatgcgtcgcaggcatcggctgatttgtggttcatctatctgctcatcatagatgccacctataagatcacgctgttctatttgtttgcaactcctttttttgttttcggacagaatcaatccgctgcttcccttgttgctttcgtttgcgctgatgatttttgcgcgggcggcatcgtcggcgctctatgcagttcttcctgcggcggcgttcgcggctatcgcctcggttgtcgttcttgttactttcatcggcggcggcattcttgcttttctgataatccagaagaacatggcttcaggcgttgtggatgcaggggagggcaacgtagcggcggagaacgcctatcgggattcatgcgcagtgctggaaaagcggttttccctcacggcgcgcgagggcgagatactgtgcctgcttgcgcagaaataccatgccccctacattgcaaagaagcttgtcgtcagccagtccacggtgaagacgcatatgcgcaacatttacgcgaagctgggcgtgcattcgcaggccgatttgtacttgcttctcgatcaggtggaaaacgagatcgaggtgcttggcgacgaaggtcgatagggggtctcttccgccggtcggattttgcagaaggagcgaggcggttcaggaagaaaggcagccgaactcgatcaagttcggctgccttatgggcgtgctcgctgcttgcaaacgaacggcattcgttgtcccgagggtctgttcgtttgaaatgcggaaaatcccgcagttcacggcctagtacgcagtgaacgactccttgggggcaaggcagatcgggcaggctgtgaagttctcgcccttgtggatatagccgcagatggggcacaggtagtacttgtcatcagacggctcgtcgatggtgttgtacgcatcgaggtagcgttccgcatgatacgcttcggcaagcttggcgcgagtgaatacctggaccgccttttcgttgccctcctcctgggccttcttgatgaaggaggggtacatatcggacgtttcgtagatttcgccgttggcgcccaagatgagattgatgcccgaatcgtatccctgcacctcgggaggctcgggcttctcggttgcgggatcgatctctttcgcaaggttgtactcgagttcgatatggatcttctccgcatcggccgtgcagttgaacagccttgctatctgagtgaagccctcttgttcggcaactttggcgaacgcttggtacttcgtggtcgcgcccgtttctccttcgattgcggctagcaggttttcgtaggttgttccgacgacggtcttgctgtcgggcaccgtttcgaagttgctcgccgtttcggcatcgggtgccttggtgggcgatagcacgttggccgcaggtgcttcggtttggggttctgcccccgcctcggtcttcggctcttcggcggccggtttctcctctgccgcgcacgcggcaaggatacccgcagttgaaaacgctgccgctcccagtgccgctgttttcacgaatgctcgtcttgatacgtctgccatgttgcctctcctcccgacggataactccgtctgtctttgtgcaagtcctcccactcgcacaatggattctaaaatagtaacaaatattaattaggaagtaaacctaataagtaaactaatcaaataagttttggcccttgccggggatgggagcccgttcggtgtacgtgcggccatgcaagagaatcggttgatgcgttttcaaagggcattgccgcaagcgatatcctcagggaagcaggctgcgtcaagcagggttttagatcgagagaaataccacgtcagaagtaggaaatgctgtgcattcgggaagatatgcgaagaaaaggcttctcggcggcacgtctgatagaatagggggactttcgcagaaagaaggaccctatgttagtcggtgaagttgagaagctctacccttctgcaaagatgctggtgaaggaaaaggtcgccagtcgaatccttgcgaaggatgcgagcctctacgagttttctgatgaagcaagcgcatgcgctgccgaatatatgggctggacggatttggccagcaaccccccgtatccccttgaggacattcagtcgttcgctgatgacgcgatcgcccgtggactgaaaaccgttgtgcttatcgggcagggcggctcgacgcaggctcccatgaccatcacgaagtacaacaaagttgattcgggcatggtgtcgttcaagacgctcgactctgattccccggtgcgggtgaggggcattctcgccgaagcaaagcccgagaccacgcttttcatcatctcttcgaagagcggcggcaccatcgaaccgcgccttgcgttgcgtgcagtgcgaagcgaactcgccgaatgcatcgacgacgaggagttcgtcaaacgtctcgtggcgatcaccgatccgggatccgatcttgaaaagcaagccaaagaggagggctgggctgcggtgtttcccggcgagccgactgtcggcgggcgtttttcggcgctttcggtattcggcctcttacccgcggcgctcgtggggatagatctgcgccagcttatggatcacgccgtggaggcggaacgccgatgcagcgaagatgcgatcgacaaccctgccgtcggccttgccgcgtttctgtacgacaactacgtgcaagggcgcaacaagttctcgtttcttacgccgaagcgcggtcgcgtgctgggcttatggatcgagcagctggttgccgaaagcctcggcaagggaggcgagggcattcttcccaacatcgagctcgatgccctgctgctcaacaaggatacgggcgatcgcaccgccatcgtgtaccaaaccaaaaccgacctgtgggacgaacgcaagaacttcgagatgagccttgcgtatcttgaccccgcgattccgcgtctcaacttcaaaatcgataacgccgccgagcttgccgagcatttcgtcatgtgggaatacgccatcgcgatgtgcggctacctcatgcacgtgtgcccgttcgatcagcccgacgtgtcgtcggccaagcaggcggtgctcggcatcctgcgcgacggccagcccgatcccgacttcgtcgaagactacatcggcgatgtgcataccggggaagtcgaagtcaaggtcgctccgatgtttgcaaacgccaccgatctgcgcgccgccttgcgggcgctgcttggcagcatcaagccaggcgatttcttcgcgctgaacgcgtttctcccgtttaccggcgagggtcgccgcgaggcgctcgagacgatccgccacggtgtcggcgtcacgtgccatgtggtgtcgtgccttgaggtcggaccccgctacctgcattccacgggtcagcttcaaaagggcggcccgaacgacggcgtgttcctcatcctttcggccgacgagctgaaggatattccgctcgaacaggaggcatcaagtctcggtgcgctggcaaaagcccaggcagcgggcgatctcatgacgcttgccgatcgcggtcggcgatgcattcacattcatcttcccgatcattcgggtgtgacgctgcgtgcgctgtccgagcttgtggtcgaagtgctcgaggagctcgagcagcaatacgagcgcgaacggaatgccgaagaatccgagtagggaaaccgagcatggtccaggggtgcaacgccgaagaagtcgagcggaaatcgggcggcgcgatcgattcgacgcagccgattgattcatagaaggattttgcgatgatcgaagcattggacattcaggttcgcggtatcgttcaaggggtgggtttccgcccctttgtttaccgtatggctaaaaaatacctgataaacggctgggttcttaacgcaaccgacggcgtgttcatccacgctgagggcgagggaaagctgcttgacgaattcgtgatcgagctttcggagaatccgcctgcggcatcgcaggttgatgagatcgagctcaaagaagtgccgctcgaagggttcgactccttcgagatacgcttttcggatgcgggggccgtcgagaagaccacgctcatttcgcctgatcttgccacatgcgaggattgcgcccgcgaactagcgaacccgaacgatcgccggtatcgctacccgttcatcaactgcacgaactgcggcccccgattcacgatcatcgaaaagctcccctatgatcgcaagaacacctcgatgaaggaattcccgatgtgttctcgctgccagagcgaatacgacgagccgctcgaccgccgttttcacgcgcaaccgaacgcgtgcttcgaatgcggcccgaaggtgagctggcgtgtgacggcggcgggcttggcggacggagcggctgcggacggcggccctgcggcaggtgcggcagcgagcgatgacggcgcgaatgcagggcgtgacgcggcttcggccgagctccccgtcgcgtggggcgcaacgcgcgaggaaagcgacgcgatctttgcgaaagcgtgcgcgttcttgcgcgaaggaaagatcctcgcggtcaaagggcttggcggattccacctggtgtgcgatgccgaaaacgaggccgcagttgccgagctgcgcttgcgaaagcgccgcgagggcaaggcgtttgcggtcatgatgaaggatatggacgcggttcgccgcgtttgcgaggtgaacgaggcggaagagaggctgcttaccggctcgcagcgtccgatcgtactgctggagaagcgcatcggagcatcgttcgtgccagggcttgccgatggcctgaccgaactcggcgtcatgcttccctatacgccggtgcagcatctgctgcttgccgactatggcggcatgctcgtcatgacgtcgggcaacatccacgacgaaccgatcgtcaccgatgatgacgaggcgtatcgcgtgctcggcggcattgccgatgcgatcctcggtaacaatcgtgcgatctgcgcgcggtacgacgattcggtggtgcgcgtgctcgaattgggagaagcgggtcaggtcattcaattcgtgcgccgtgcacgtgggtacgcgccgatgccgcttgcgctgccgctgctcggcggtgcggatggcgagggcgatgggggcaaagcggccgacgagggcgcgccgaacgaagcggccggcggtcccgcgtctgacaagcgctcacccgcttcgatattcgcgacgggccccgagcagaaaaataccttctgccttacgcgcgagaacgaggcgttcgtctcgcagcacatcggcgatatggagaacgccgaaacctacgatgcgtggctttctgcgaaggcgctgtacgagcgcctgttcgaaattgcgcccgagcgcatcgcgtgcgatctgcatcccgagtatctgacaagcaagtgggcgcacgagcagaatcttcccgttgtcgaagtacaacatcatcatgcccacatcgtgtcggtcatggcggagaacaagcttgagggcccggttgcgggttttgcgtttgacggtacgggcttcggagccgatgggaacatctggggtggggaagtgctgctgtgcaatcttgcagcttatgagcgcttcgcaaacttcgcttacgttcccatgcccggaggcgccgccgccatcaagaatccgctgcgcatggcctatggcgtattgtgggcgtttgatctgctcgagcatccaggtgcccgcaaggctctcggcgagcttggggaagcggcggatgtatgcggccagatgatcgatcgcgggctcaacaccccgcttacttcgtcggttggccgtctgttcgatgcggcgtcggcgctgctcggcatctgcatcgctccgaagtacgaaggagaaggcgcgattctgctggaagccgcgatatccgcagaggacagaacacgaacaaatgtttcacgtgaaacactcgatgccgccgacgccgatgcggcggagcgctatgcgatcgacatcgtcaagaacactgccacgtccgagagcaccgcgctcgatacgtcggtcgtgctctacgacgccgcccccacgttcaaggcgctgctcgacgattatgcgacgggcgttgccgctgcgacgatcgcgcggcgtttccacgacgcgttcgtgacggcaatcgtgcagggagcccggcttatccgggcgacgtacggcatcgatgccgtggcgctgtcgggcggcgtgttcctcaaccgctacatcatggaacatgcgatttcggcacttgccgaacagggattcacggtcgccgtcaatcgcgatctaccgccgagcgatggatgcatttccttcgggcaggctgtggtaggattgcgcttgtaacacagataggcgtatcgcggttcgccaaggcgacgagaagcgtgacgggcggccgctgaaagaaggcaagctatgtgtttggcaattccagcaaagatcaccgagtttaaagacgaccgtatggccaccgtcgatatcctcggggtcacgcgtgtcatatcccttgatctgactccccaggcgaacatcggcgatttcgtgctcgtgcatgcgggcttcgcaatcgaagtggtcgatgagcagtacgcccaggagacgatcgatctcatcaaacagttccccgagctggcaatggacgacgtgccgcaagccgatgctccgacacctgcttctgcttcgcttggatcgctggggctttagccatggacctttcccagttcaaggatcccaagctcgcacgcggcctcatcgattccatcagcgcccttgccccgaagcaggcaacgctcatggaggtgtgcggaacccacaccgtcgccatcgcgcgcaacggcatccgtgcacttatgcccgaaggcacccgtctggcatcggggccgggctgccctgtgtgcgtgacctcgaaccacgatatcgacaccgtcatcgcgcttgcgcgggtggagaacgtgaccatcgcgacgttcggcgatatgacgcgtgtgcccgggtccacatcgagcctgctcaaggagcaggcagcggggcgttcgatccaaatcgtatactcgccgctcgacgcgctcaagctcgcgcaggataatcccgagcgcgagatcgtgttcgtgggcgttggcttcgaaaccaccacgccgcttgttgccatgtccatcaagcgcgcgaaggcgatgggcctcaagaacttctcggtgttcgccgcgcacaagaacatgcccggcgcgctcgagacgatcgtgaacgaccccgagctcaaagtcaatgcgctcatcctgcccggccacgtgagcaccatcatcggcatggagccgtatcgattcttggccgagaagtacggcatcgcaggcgttatcaccgggttcgagccggttgatgtgctgcagggcatcgccatgatcatgcgccaactgcacgagggccgcgctgagatcgagatcgcttatgcccgcggcgttatggcagagggcaatccgacggcgatggctgccatcgacgaggtgttcgaaacctgccccgctatctggcgcggcctcggtgagattcccgattcgggctatcggattcgccccgagttcgccgaattcgacgcggtgctgcgtttcgatcccgagattgagccgacgcaggatccgaagggctgccgctgcggcgatgtgcttcgcggcatcatggcgccgaacgagtgtccgctcttccgtaaggtttgctcgcccgaaaaccccgtcggtccctgcatggtttccagcgaaggcagctgcgcggcgtattatcggtactactgatcatcaaaaagaggtggctttcggctcgccgtattcgcgtatcatggaatccgtggatacgacccattgtttgtcgtaagagatggctttgcgaaatacgctactggcgttgctagcttacatctgcgttttctaccagagcgatgagttcttctttggaatgcacgcccagttttgtataaatatgcgatacatgggttcccgtcgtgcttttcgatataaaaagttcgtttcgaatatagggcaacgatcgcccttctgcgagaagggcgagcacttcgcgttctcggtttgacagtcggtatcgctcggcaaccgtatcgcatctttgctcgaaaagcgctcgggcgagcacttcgacatctacaggattgagggccatttcctccgaattgcccccgctgcccccgtcttttcctagccgaaagggttcttcgtcgtgcgttctgctaaatgaaggcctcccccgatcggtcatcgagaccatggcagccgctacaagtatcgaagaaaggaggaaaagagtgctactaagcgatatggagtgggttttcatgatccatgctagcccgttggcaacgatgattccgaaaaatattcctccctccagaaagaatcttccaaatccgatgatggcgtgtgcgaaacctttttgcttcgaggacaattcgcagaagtaaatgaaggtcaacacgtcaagcgccatttgcgcggcgaaattgcatagacttccgcagaatagcgagacgggaacattcgtcgagacgagaaacagtgcgaaaactacaagagggatcacccatcgatataaggaatccaggttgattctccgggcgaaggttatgcagtagagagcgaggattatagcaaccgctgtgccggagagcagagatatggagaaaaggttgttgtcgagcatggcggtttctgaaccgagcaggctccaaagggaactgatgcacatcgacgccgcgctaacgccgagccctatcctgaaaaacccccgaagtccccccaggttgtaagcttctccgctcgtttttctatactagaatcggcggcttgtgtttcttctgatgtatcggtgccttgcatacggcaaagtattctgcatgcaaaggacatggctggaagacatacaaggaaaacgagcacgactggtcgtgggacgacgagacagaacgcgtagcataagaccatgagcgcaacggaaaacacggtgtaagattcaatttctctggcatcgaggcttgagtaatatagcccccagctcattgtccccaaagccatgccaacacctgaaaggctccctgcgattatctgaagcgaagtttcgagccaggcggcgttaattgggagtgcgataataagaaaagtgcttgcacatatgagggtgaaggaggctttcattgcggttatgccgtttttttcttcgactagctttctgccggttaagcctgctgcgaagagagcaattgcagtaaaagccatgtttgcgagccagtatgtctgggatgagccgactccgttttcagcgaaaacgtgagtgaaggttgatatcgttccccaggaaagcaagaacccccatccgagaaaccgtaagctcggaatgctttcaagcgcgcgaaggagtgcggagcctccttttttcccggcgtcgaagcgttcgctggtccattcatcttgcggtctcccttcctttcgtaaggattttagacgatgaatcccttttgagtatcgggtacttcacccgatgtgatgagaaatgccaggtcacgggtttcaaaaaatgatatacatcgaccgatgtgcactctgtttcagatatggagaatcctcgttgtgtgttggtcgcagcaggcgaccatgtatgcagaaccgaacaacgaggaggaatcatgaagggaataacgagaagaggatttctgggaggaagcttggttcttggagctgcggcggtggcagggattgcaggatgcagtccgagcaaggatggggaaacggggcagacctcttccggcaatgcggcttccgagcattcctgggaaaccgtgcccgagccgatcgatcctgctgaaatcaccgaaacgaaacaggctgacgtaattgtcgtcggcgctggtcctgctggtttttgcacggctgcctcggctgccgagaacggtctttctgtcatcatgatcgaaaaagacgatacgtttaacgcaaacggcggtgcgatgtttgtgtgcaattcttcttatcagaaatcaattggttacgaagtcgataaagatgcaatatgcaatcagtaccttgagataatggggaaaaaggtaaaccagaaactcgtatggaagttcttcgatcggtctggggaggcaatggattggtttgccgccattctcgagcaatacggcatgacgcccgtaatgcaggggatcggtttcgagggcgatccgaataactgcgcgatacctggaacgctcgttttccagggaggacccaacacggcaaccgatgtgaccgactacgatccgtatacgtgcgatctcggtctgggctttattcccatgaacgactatctagaggcgttgactgattacataacggggaaaggtgccgttatcgagtacggtgtatcgtccgagagggtattgagatccgatgatggtagggtgacgggtatcgttgcttcaactaaagacggaggctacgtacagtacgatgctggcaaagccgtcgtcatcgcggcgggcgattacggtgcggacaaggagatgctcgaatactattgccctcaggcggcgcgtttcggatccgatctaatgatatcgacgatgaatgcgggagacctgcataagcaagctatgtggattggcgctgcgatgcagaagtggccggatcatgccccgtcgggcttctgcggcgacgcccatcccgtttggaatctcaatgtcaatgcggaatgcgagcgttttacgaatgaggatacttcgacctcaagcctcagttgggctattttgcagcagaaggaagggaaaacctacagtattttcgatgaaagctatgcgacgaatctcccttacgttcccggatttatcggagcggatattccgacgcccgagcagatgcttgcccgttgggacaaatacgtggaggacggggtgtatttcaaagcggataccatcgaagagcttgccgaggatcttgggctcgatccgtcggccttgaagaagaccgtggacgagtacaacgccatgtgcgaaaccggggaagacactgaatatcacaagcgggcagacttgctgtttcctctcaaggctcccttttacggtttcaaatgcggcgtagcgatgcttacggttcacggggggcttcatgttgatgaagattccagggttctcgatgccgaagacaaggttatcgatgggctgtatgcggtcggtctcgctggcggcgacttctgggcgaacagttacacgacgcggtatgcgggtattagccatgggcacaatttgacaacgggctatctcgtggggcgcctgctggctggaaaagagtaggtctgggatttcaaaaaggcgaatgcactggggactcggtagggtataacccgccgagtcctcgggctcgaggcttgtggctccgcccctctatgcaggtagttataatcgaactctatctagcctggtcggctcataagctaacatgaaaaccgtctgtttggatcgcgtcgctggtcttcgattgagaacacgacgatggggaggttgggatcgggctcgcccgaatagtagattccgtaatggcctgcgtagaccacgcggcactccataggcggcttagctgcttcgtacgccggatcgtaaacggatccagcggagtaaacgatcccaagaacgcccagcatctttctaacgtcgacatagtctttgtcggaggggatgtttatcagctgcaattgggcttcgtcggtgatgacgacgcttctttcgttcattggtgggtttccctcgccttatcgactgcctccaatgcttgatcgagggggaggtagtgtccggcaagatagtcttcgtatccacgcatgatggatttctgcacgcgaatttcgcgatcacgaactctttcgtggatggccatctctctatcaaacgcggcggcgtccattacgacgacggaagccgagccgttgcgagtcaagtatatgggttcgctactacgctcgcatttctctacgatctccttgaaattcctctgcagatcgctgatgggaagaactactggcatgatgcacctcgtttcgttcgggaggacagcatatcatgtagcatgatctttatagatagtttatgcaaatttacataccattgtttcctgatggatagatagaaggccgattggcaagccgaatcgagccgagcgctttgcctttctcgcggatgggagtccgatgtcgtccgactcgccgtcgtctcgattcgtggtatgcggtggttttctgaagcaagctcatgcatcgacgcatggggtttgtcgagcacctcgctttcgttcagccagataggcgattgataaaatcgatgagctcttgcttgtcgtggacgtccagttttgtgtaaaggcgtcgtttgtgggtattgacggtgttgaccccgatcagaagctcctggcttatgtaaggtgacgttctgccttgcgcgagaagcaggcatatctgcatctcgcgatcggtcagcccgtagtcttgctttagggcgctcttcacggctgcgacgttttcttctgcgtcgtattcggattgagaacgcgcaccggatttcataagagcccagacgttatcgtcggtattgacatcgaggacgagcatggaggcgatgacgagaatgcacacggatgacgataggataccctgtgtttgaagagcgtctcccaagaatacgtcctgtgcgcatacgatgataatcgttccgatgagaagccccagagaagagaggagtcgtgccggacctgccacgagtccggcatcggctcgctccgccttcatggtctcgaagacgatggcccaagtcatgcattcgaaaaacccgtaggcagcatgggctatgaatcctgcggcgaaccccccttcggctccaaggaaaggaagaagcacaagccccgcgagaacgagtgcggttgagagtcggtaggctgtatgcggcttccacgcaaacgcatacagcccgacaaagaaaacgatcgcagcaagagcccgtccgctttgctgaaaatccatcaaaatgggatcgggcgagacatcagtgcttacagaaaaatgctgcatgatgccaaacaccagaccgaaagcgaagaaccagaaagcggtgttgcgagggaagcccaaaatgcgaatcgtacgcgaggtctcttcggtgtgctgctctgatgaaaagagttttcgcgttgcgttggcggggagggttgttccttttggctctgcaatgaaggctgcgcttgcgcatggaagcagggaaacgacgaagggctgtatccacgaagacagttcaattgccagaagatagatggggaaagaaagcgctatagaccctgcaacaaggatgtgccccctgttttgagagtccgatgcataatcatttgcccatatcaaaataagcacgcccatgcctatacctataaaaacaaggcctaggatgagcattcccgtcagcaggctggtgctgtatgcatgtacaagaaaggttccagcgcagccgcatgccgccgccgtccaccgggtgggcttcatgcggagaagggttgaaatgctcgacgaaataaagcagagaagatagacggcgatgcacgttgcaacagagatcatgggcactaagtctccgaagagcttgccgccctccatcatgcgtgccatggggatgccaacgagggctgcgtcgacccatgcccagaacaaggcgagtccgagtatggctcgcacggaaaacgggtctatggctgcgcgaaagcccgtagtgcttctttgctgttcgaacggagtcataccgctattgtgatggtttcgtggcaatggtcaaggggctggttgccgcgggcggatgggagctggtcttttggttgactcccatccgcattgttgttctgcgtggatggatccaggctgagggtttactgtttgaggtcttgggcgacttgttgggcggcatggcgaccggaatatgtgcaatagccgttcattccgccagagatttggtaattgtaggtatcttggtaaagaccgcacgaggtaacacccgagctgtagaggccgggaatgacctggttctcaccgtcgataacttgcatgtttctgttgatgcctactcctccgaacgtagtgagcaccgaaagatcggtatggacggcgtaataaggaccggagccaacggggttcatgtactcggaatcctttccgaaatcctcgtcgatgcctttttcgcacaactcgttgtatcgaaggatcgtcgcttggagcgtttctgggttggcgcccatgtcggtggcaagatcctcgagggtttcgcctttgtatacgacgcggtacccggttgcctgggagcccgtttcgagctgttctcgcagaccgggaagcgtatcgcctggttcgacttcgaggtttccgacgtagctccctcggccgttttcaagcaattcaataaaatcgttgtcgaagaacgtatacgtgctcgtaagctgagatctctgtgcgttgatgaccaaggcgtaaagcttcttaaggtgaaggtcttcggccatgaagcgctcgccgtctccgttgatatagaggccgggttggatgcaagatgccatggagatcgcatcgcggatcacgaatccatctacgccaaggcagggaaggattgatatgtcggtttctttcgctccgacagcccaagccatcctatgcccatctccgacgttgggcagcgggaactctggttttgcatgtgtcgtgtcgatgcccgtcttttcctgaagcagagcgaggtcgtttccgattccgccgcaagcaagcaagacggccctcgcgttgtattcgataactttgccatcgccggtctcggcgtaaaggccgatgaccttaccgccttccgttttgaggtcgagcgccgaagtgcccgtatgcgtttcgatgccgagctccccgattcgcgccgtcatggattcgaggaagctcgttccgatcttcccttcccaccagtgagcggtatcgaaggcgctgaccccacggtagtcatcgacggaatcgaacggaacgccttgctcttgcagccaatcgatgttttctcccgagtggtctacgtagtcgccccataacaggggatcgctgtgatggttggtgtaggaaagctcttcgttgaccacttggtagcgataggggagatccagatttgcttcagcctgcattttcgacccgagtccgaaaataacctcggtagcaaaggaagatcctccgatctcagtcgacttttcgatgaggataacgtttaggccaagggcggtggcctctattgcggcgcacatgccggaattccctgcgcctattatggcaaggtcgcattcgtagctttgttcgggtgcataggtttttgcctgactgttctcttcctcgggtgttgcttctttcgctacgggttctggcgcgctgcatccaacgatcgatgctgccattatgctggcgcctgcgacgcttgctcctttgaaaaaattgcgacgggtaaggttcatgatgtctccctcctaaggatgtatctgcttgtcgaacgcttgggcgaacgatgtctcgatgctatggtgagagagaaaagccgtcgacctttgtttcaggtgtttgttgaacaaaggacgtcacctgttttgcagtacgaggggattttatgctggttgacgagctgaaatatagctcggtaccggcaaaccacccgtttgtggcgaggaaccgtctgttacgctatgctgcgaagagatgggaacgaacgcaaggagcacgagaatcatgcagcagtgcaacctgtttatcagtattccgtttgtggttgggcatgccgattgggacaccgcgccgacgtacgcgaatacggcgcctgcggtgaagcggtcttatctggatgccgttcttgcggaaatgcacggattcgccgaagatgcgcagtcgcttgaaatagcatcggttacgtttggcacggggtcgatgagcacgattcccgaatccgacatgcgcgaatttttgagcgaagtcggccgcatttttcccatagcgccagcaacgcccgtgcatgcggtcttcgatcccgggttgctttcggtcggccaggccaacgaactcaaggcactcggtgctccttggttcgagtttcgttactttacctcgaatttcgacgaagccgacatcctgggtgtgccgtcgggcgaaaccgagatgaaaaaaacctcgattctgctcgagcagatggggctcgagcacgttgtcatgcacgtggccctcggcatcggcggccaaacgagtgcctctctcgaaaagacgcttcgcgacgctctgcgttctaccgttgttggcttcgagttggtacccttgcgcgagggctggtcgcgtgctcaagacgacgatgacacagcgcggctgttcgaacacgcgagcgcatggctcgaaacgcacggatttcgcccgacgacgccgactcggttcatgcgcgagggcattgacgatccgtaccatgcgaacctgtatgcgcccatcggggaggaggctgggctggcaacgctctcgttcgggccttcgacgatctcggttttcgacggcttgctttggtcgaacatcggcgatatcgatcggtacattcgggaaagcgcgaacccggcagccatcaccgaacaggttgtcgaacttgatgcagcggcgtccgctcaacgacgcgagctggatgctctgtatcgaaaagcagccgatcggctagatttcaaagagcgtcttcgctatcggagggtattcgagcggctttcgaatcgcgtgtgattgtcggacggtctcgtgggcttcgtagattcgataatcgaacaataaaagatcttgacaaacattagacatagtcttatattggagaaggtctgaaacacatgaaagagagccatcgtttccccaagagatggctctctttcatttttcgatgtgcgtctgctctcgcgtcgtttttctacggcgttgcaaggagctctcttttccaacgacaaagccgtcgctgcttttatgcgataataaatgtcatgcggattctgcgggaaccgtcgagcacaattttgatgttgggggaagcgactgtgcgctcgacgtgctgagcggtgggaggaaatcgtggtatacgcgaacagggcggctcatgttttggcctgacaagggggatatagcatccaatctcccccagaaagacgaacttatcaacatgctggatcgtgccggtgttgactgtttcgtgaggcatgttccgaaaggcggaatattcggatggggctcggaacctcataagaccgcgcatttcgtagtcgaaggcatggtcgagatctataagcttgaacgtgatggccgaaaaaagacgctttacttctgcaaaaaaggcgacttcttcggttttcaaattctcagcgattcttgtttgcccattgcaactgcgtgcgcatgcgttgatagcgagctcatcgccattccgaaggaatcgttttttacggcaatgcatacgtgccctgaattcaccgatatggttgtaaagtatctgtacagtttgatttccgtgcttacgaacgaaacggtttcgtcggcattctacgcgaccgcccaacgcatccccatgcttttgctcagccttgggcgcgacgagctggaatcgcgcgaggacgattgcggtgccgaaatggctgatggcgcaggcgagccccttatcgtgaagtacaacaacagcgatattgcaaacattttgggaataagcaggaattcggtcacttcatcgatctctcggctgcaagagcagggtattgtgaagaaacgacgcaacagcatcgagatactcgacatagagcgtttggaacgaattacgatgctcgaaacgagcgagtagcgggcatggcgagccaggcttgcgctcccgaagcgggctgcggagtttccctggtcgccttatgcacaatatttgtcagaccaagcggctttcggcggatatactctggtatcaggggcgtatgggaggataccggatacgatgaagacgatgcagccgatcgcggtggagcgtaagcgtgcccataaaggcgccgtgccgctcgtggggctttcgttcgcgggatttttcatgtatgggtgcaacaacattctcatgactcttctgccgtcctattcgctcagcatcggtgcgacgatggttgaggcgggtttgcaaggaacggtgtttcttatcgttgccgttgccatgcgtttctacttcgggcctttggccgatcgtcgcggaacccgtttcgtcatggtcatagggacttcttcgtttgttgtttcgagcttgctgctcgcgttcagcacgactttctggcagcttttggttatccgaagcgttcaggcggtagggctttcggcgttttggccctgtgcggttgccgctgttgcttcgatagcgcctgaaggaaaagacggtttctatatcggctcttatcgattcgctaccgcagcttcgcttctgttcggccccctcattgcgttggccattgtcgagagaagcgggtacgcggtttgttttcaggttttagcgggctgctcggttgtggcgttggctctctcgctctatttcgccccacgccgtaatcgcaccatcggggaatcggatctgccgaacgatggcgcatcaggcagggaggttgaatctggcgaacgggatgatctgggaactgcgagaaccttgcgtatggctttcgcttcggggcagcggagccttatcgtgctcctgtgtgtgactgcggtcgtttcgcttggatacggtctgtcgatgaattttgtcgtaacattcgttgagggcgagcaggttcccatcaacgccgggctgttcttttcgtgcttcagtatcggcgggcttatcgcaaatccccttgcgggatggattgccgatgcatgcgatcgacgggttttgctttcggcgacgctcggcttcatggggatcggaattggcttgatcgcgcttgtccgcattgagcctttcgtgctgttggttgcgggttttcttgcgggtatgggatcttcgggttcgacgatcgtcgttctttcgaccatttcggcaagcgtagatgaacggtttcgcgcctcggctctttcggtgcagcaaaacgtcgtcgatcttggcatcgcttgcgcttcgaccttgttcggatggctgttcgccgtcgctgcggttcccgagttcgtgtttgcggggcaggcgctgttcgccgttgcctgcgctttggtgctggttgtcgcgaaaaaggtggttcgctgctgagaggcttgcggtgctgccggatgcgttgcgcttgtattcgaaacaagcagaacggggctttcgggccgtcgtatcgctgccatcggagttattggagaggggtattctcgatctcgatatcctaatacgggactcttgcccctcaattaataagctgtcgataacggcacgctgaatccttgctacatatcaacggtaaatcgcgtttttcccatcgaagggattcgtgtaatcatgagtctccttcgggcgtgatgcgatgtacgacttgctgcgtctgttttatgtgggcagagggaaaggaaaaggatatgggaggaactaatctagaccgccgcaatttcttgaagggcgcagccgtcggtatggcaggtgtggcagcagttggtttgggtgccgtgacgggttgctcaagtgatgccgactctgaggccaaagcatcaatgggaaagggatcgggtatctatccgtatcgggtgattacgaccgatgttgttatcgtaggtggtggcatggctggtatggccgctgcgaaaggtgtgcagaaaaacggatgcaactgcattatcgttgagaaaggtgtacccggacactcgagctcatcgggtatgaactggggccacaacacgtatacgtatgagctttacgatgaaattgaagatgatcacgtggcggcatggacgtatttttgcgaaggtcttgtcgatcaggaccgcctaaaaaagtctatggaggcttctgccgaattggcgtatatcgaaaaaacggaagagctaggctctgttttcgagcgaaacgaagatggcacttctggttttgcctatgacgttgccgacatgggctctgtggccaatggcttgtacccgcgtcactggatgcacgatgccatgcgtaacggcgtgcgatttcttgaacgtacaatggttgttgatgttgcacttagcccagaaggacgtgcggctggtgttgtcgccatcgatttgacgacaggggaagcggttgtggttcgcgctcatgctgtggtcttttctacaggagcatacagttgggtgtatggaaataccacaacaggtgcccatagtgccaatggccctgaaagtacaggcgatggtttgggcatccttatgcgtcatggcgtgcgcgctaaagacatggagcagattatcattgccaacttctctgtatatccagaagcattttctggaagcctcggcggttttatggcttcaacgaatggtatgaatgcattttgcgatgccgatggtaatcctttgtttgggtctggtgcaaagtattttcaggaggtcgacatcagcaagctctctgtaggcggctcgaccctgcgcatgatgtggtatatgcgcgatgcggaaggggcattgtatgcccatgctgatgagccgggtcttgcgccgcgctacattcgccgttccgttgacaacgtcaagcgtttccttgactacgaatatccgagtgtggttgagctgcagccagctgcttgggaaacttgcgcaactcccgatacggatgcgtcgtttcaaacaacgctacctggagtattttgggcttcctatactatgcagagcaccattcaggcttcggttggcacgggctatgcttcgggaaagggcgcttcggaaattgcggtttcgaacgatgctttgccggctattgacgatggacagattcaggattcgcttgctggaaagtatggcttactcgatgccaaaggctcagttcgtgcctatgaggtctatcgcaagattcaggcggcgctggagcttgcctgcccgaccattcgtaccgaggatggtatcaatgagggtatagccgagcttcagcgtatcaaggaagaagatattcccaacatgtatgtggcggataagagtctgtgcatgaataacgaatggaaaaacgctatcgaggttgagaacatgtggattgtagctatggggtcggcgatgtcggctcttgagcgtcgcgaatcccgctgctatcacgtgcgtcgggactatccagaatttgacaacgctaaccctatttctcatatgttcgtaacgcttggcgacgatgggtcgatcaccgttgcggccgaaccagtggattcgtctatcatcagcgaggatatgattaaggcggttacggatggagccgtcatgagcatgtagcgtattgcttgcagatcgaaccgatagtgcaaattgtttgataccgcagtgcatatgcgttgcgacatttgtgaggaagggaagcgttatggctgataatgttgttgcgaaggtgtttcgattcgatccaaccgtcgatgaggagcctcgttatgaaacctatgaagtgccagcgaaggagaaccagactgcgctcgaagtgcttcactatataaacgaaaacattgaacccctgaattatgattattgctgccgtggaggtttgtgtggccgctgctccatgaccatcgacggcgcgccgagcctcgcctgttttactcctatggcggagggcaagcacactattgacccgctcgaagggttccccgttgtccgcgatcttgttacggataagaacgaggtgcgtaccaaaatcatcgatactcgtgttgagctgtatacggtcgatccgcttgatattaacgctatgcctgagattgatcacgatgtgtattggaatgagcttgataccgttaacatgtgtcgggagtgcatgtgctgctactcgtcgtgcatggccttcaactcgaaagaccttcacgaatcctatgccgggccagccgctctcgcgcacattgcccagcgttttcttgatccggaggatcagggggatagggtgttgcaggcggtgactgctggcctttacgattgcatggattgtggtatgtgcgaccaggtgtgccctgcatctattccccatctcgacctgtatgctaagcttcgcgaagcggctgaggtgcgcggattgaaaccgaagagtgccgaatagcatattttcgttggggcgtggtttttcgccacgccccaatcctaaacctagtggttgttcattgatatgattgcttgctggattatgagcattcttacgcgggcgcggcctcttcttacccgatgttttcgcaggcatattctgcaagctctgcgataagggggttgttgtcggttttgcgccatgcgacgtagttgtcgtagtccagagttgtatctccgaagcttcttaaggtcatgtcgggtgcagcggaaaaaagaggctctttgacaaggtaggaatcgagaaggtagataccctggcgtggattgagcatgaagaactcatctgatgagtctaccgattttaccgaaaagtgcggttcgaccccgtatctattgagaatgtcggtgtagagaggaatccattcatcgtaggccttccctgctggtacgagaatgctgacatcagctagatcgtgtatgtccagtgtttgcttccgggcgagggggtggtcatctcgcatccaagctttcaatgacgatcgagtcatcaacagcaaatctatttcgcacttttcgcactcgcgtgcgaaggcttcttggggctttcctgaaattagccacccgacatcaatgcttttggcaagcagcgcatcaaggctggtgcgatcgggttcttggacgaaggtaattttaaccccaggatgctcatcgcgcatgcggcggaatgcataagtgacgcgtagatagcctggcgttctgacttcgggttggcggagcctcaatgagaaattcgatgagtattgaatctggcgacacttcgcgaggttttcatcgtaaagctttgttaaatgcgcacattgttccaggaacaattgacctactgacgtgagttgtaccttcggttcgcgttcgacgaggttaaggcctgtttctcgttcgagatcagcaatatgtttgctcatagatgattgcgagaggtttaggttcatggcggctttgctgaagttcaggaatttcgcgaatacaacgaactcgtgcatggcttcaatagtgacggatcgattcatgccgtcttccccttctgcagtgtatgaatgctgaatctacattgtatcgtaaaggcatctgtgttgtctgatttcgactgctcgaaacggtgttgcactgcattcgtttgttttcccaaaagaggaagcccgcagaagcgggcttcctggaaggggcctttcaaggtgcgtatgttgtacggctcgttagcctacgtagtacaccgagggagtcgtctcgtattcttcatggaaaggtacggcgcctttctcggcgatgtacttggacacttcgctttcgggatcgttgatgtcgccgaagatgcgcgccttaccggggcaggaaagcacgcaccagggctgctcgcctgcggcagcacgttcgtagcacagattgcacttcgatgccgcattggtcgtttcgtccatctggggaatgtcgtatgggcaggcggttacgcacgttccgcatccgatgcatgcttctggatcgatgatgaccgcgccgtcttcctcgcgtttttcgattgcgcctgccgggcagtttgcgaagcacagcggagatgcgcagtggttgcaaagttcgggcctgaatgcgagtttcgcgtcggggaaggtgcccgtggcctgatagacgatctctccgtcgcggctgtgcacacgtccccagtataacccctcgggggtctggtttgagaccttgcagctcaccacgcaggtttgacaacccatgcagcgggtcgtgtcgatgaccatgccgtattgaaccgtgtttgccatgattgcacctacgctttctctacttcgaccaatacgtcatagaaagcggtgctggtttggcctatgaactcttcggtcggattgacggtgaaatgggtgagcatttggtagttgccctcgatgaattgctcgggcgtccatccacttgccgttgcgacggcgccagggtagatgccttcggtaagaaacgccttcatcttgcattcgccgcgatcgttcttgatgaggatgacatcgccatgcttgatccctcgggcttcggcatcgatggggttcatctcaagcagcggctcgctttgcacgacgctgagctcggggatgagaatgtgctgcgagtggatgttcaggcgatcatggaactgcagatatacgagcggatacttctgcccgagctcgcttgcgggatcctcgagcatcggcacgtaggtgggaacttcctgctcgtagggcacgagctcttcgttgtagagctggaagcgcttcgagggcgtggggaaggtgctgtccgggcggaagatcaaaggctcgaagatcgcatcggcgcgggggaagatgccgtcttcttcggccaccttgtcgaaatcgaagccctcccaagcggggtgatcgggagtgaagaagccgcgcgcccattcctcgtcggtcttattccagaggtcttcgagacccaccttctgcgcgagcaacgacatgatttcgacgtccgacttgctctcgcccatgggcgtgatcttgggtttgctgatgatgacccaaggcgtgcgatcttcgacgtcccacttctcccagtagttgcaggcgggcagcacgtagtcagactgtcttgccgtccaggtccaatacggatcgaccgttacgatcgtggaaacgttgggcagcacctcgttgatgaccttgttggcatcggggctcatgttgacgaagttcgagtttgcgaaccacaggaagtcgagcgggtaggggtccttgttgatgatctggtcgtacatggtggatgtcctgaccatggcggcttccttgtcgccggtgttcgaccaatcggggttgccgagtgcgggcgttttgatatcggggtgggattctgccgccgtgaggccgcccatgtgcgacgcgccaccgccttcgacgcccacgtatccggtgatggccgcaaggaccgcaacggtgcggaacggcgagaacgagttgtagacgcgctgcatgccctggcccatgcggatgcccgcaggcttcgcgttggcgtactcgagggcgaacgtctcgataacctcttcggaaagcccggtgatctcggcggttacgggaagcgtgtacttggaaacctcgtcgaccaggtgatcgaatgcggtgcgcaccgcttcgccgttcgcgtcgaacgtgcccgagagagcgggagtcgcgctctcgtcggtgtattttttggcgctgcccgtggcagtgtcccacaccatccagtcttcgccgtccatgaggtagctgccgtcggactcctttacgaggaagggggctacgctgtgcgcgagcagccattccttgtcatggaggtcgttgccgatgatgacgttcatcatgccgagggcaagcgccggatcggtttggggcttgatggggatccactgatcggcgatggctgccgacgagcacagacgcggatcgaccacgacgatcttcgcgcccttctcgcgggcttgcacgaggtagcggaactcagaggtgtgggtgtctgccacgttgcggccccacaggatgatcatgttcgagttgaggtagtctcgcgtgtcgtgcgagccgcgcttcacgccgtaggcgaggatcatgcccatacttgcgccctgatcgcccatgatgccttcgatgtcgaatacggtgccgccgaacgtgcccgcgaatcgcgtgggcgcgctcatcgacaggttgcccgaattgccggtgaacgagtagaacgccgccgacttctcgccgtacttctctttggtttcaagcagcttctgggagatctcctcgatcgcctggtcccatgagatacgctcgaactcgcccgagccgcgttcgcccgtgcgcttcatcgggtacatgacgcgggcgttttcgtcctgggttttctggctgagcgccatgccgcgcaggcaggcgttcgcgtaatcctcgcgacccggtgtgtcgcccggggtaaccgtgatgatcttgccgtccttgatgtgcgccttgaggtggcagtgcgacgtgcaattgaggttgcagcatgcgtgagcataggtgacgccctcgttcggatcggcgggtgctgcgtcgccttcctcggctttcggctcgctgctcggcgcacagctggcgaggccgaaccccagagctgaagtgacggtgatccatccagcgcccttcacgaaggttcggcgggtgagtttgccgtccttcacgtactccaacggtgaagtgtccgttttcttttccatgttcctcctatcgtcttgatggccgcagtcggttgcctttcgtgcgtgcggtgtcgctgcacacgaaggctcgcttccccccactgcggaccgaacaagtataggaagggcagacctgttcttctgcccagaattggtcacatggaacgcatcatttggaggcgattgcccgacgagacgcggtacgccgttcgttgaaacgggattttcgaatgcgcaggatggcgtagatgagggcaattccgaggtagacgactatgctctcccaagcggtcgctttttgggctgtcgccgctggtgctaaaacgagcacgatatggatggcgatgagggcgaaaaatacgtaggacgccctttgcagctgcttccacgtttttcccggcatgagctttcggacgcgatcgaatgacgtgacggtcaaaacgatgccgagaacaagtagaatcgatatggtggcaagctgcatcgcgtacaggggcgagttcccaagcattgccacgaggttggggaggtacgattggatttgcgcggcaatgtgggggatcgcaagcgcgaacgccgctagggcgagatctttgcgcagcggctgcagggcgtttcgagcggcagacgattctctgagaacgccgatgaacatgacgatagtgaaaagggaaaaggcgacgagccccttgcggataagcggaaagaccgccttccaaaggggtgcgggcagtatcccgtacgaccctgccgcatacagagccatcaggacgacgaccgctaggtaaagcggtgccgaacgcgctttgaagaggaggcttgaggcgacgacaagcgctgtcgtaccgagcaacgtggcaagatattccatgtcaagcgacccttcctgaatcggcgtgggcggcctcattgcgggtgaccgccgtgtactctcgattcaagtgtagcgatcggtttggcttccatctgcccaatgttgggcagatggccagatggattgcggcgaagcgggcttggcgctggtatcgcggcgctcgaatcgccgtagtgtttctggtggtttcggaggcctggcggaagcgaagacgccttcgcttccgccagtctcaaattccagaatgtgagattccggaagctcgccagcatgcggcgcgatgggagggatacacgccgcatgtgatggatcttgagacctacagacccggagggccaccggctgggttgttcgctgcttcttcggccatcttcgccagcttctcggcgtagacgtcggccgctgccttgtcctcttcgagatgctgcgcgatatgctcgccggcaacgtagccctgtgtggtggcgatgccgaccgaattgcccgccatgagcgtgtggtactgcaccgcgtagcgtccgccgcagtcgttgccgcaggcgtagaggcccttgatgatgctgtcgtcgagacggcgcacctcgaagttgtcggtaacgagcacgcccgacatctgcaccatgccgctcgagatgcgacccttgtcggtgttgccggccatgccgaagaacggcggggtgtcgagcgggttcatgagatcggcatcgcggccccaatcggtgtctttgccggcagcgcacatttcgttgtagtgtgcgatctcatcgagcagaccttgcttcgcttcgccctcgtatccgaggatatcggcgagctcctcaagcgtttccgccgcgtacatcttcgatttgttcatgccgtagccggtgaacccgtacacttcgaatccgtcggggccggtcttgtagttggcgaggtcttccttcaccagatcccattcgcgggcgcaggtggtggaggacatgttgtgttcgtagccttggttctggatgttctcctcccatttgccgtcggcgatcgtgcacatgagctcgccgcgagcgcgacgcgccatgaagccgaggccgccgaactgcagctgtgcatcgttgaagaagcgcttgccgtcagggccgaacacggggtagttgccgatggcggtgagtccgggaacgcccatgccgttgccgaagttcatggctgcccgcggaccgggttcgatgacgccgccagcccagcaggcgagcttgtggcccatgccgtcctggcccatgcccatgaagccggaggggtcggttgtgtcgaggccgctcgcctcggccagctcgcgtacctcgtcgttcagggcgagcaccatctcgccattgcccgagaagtcgccgcaggcaagcagaacggcgtcggcgttgacgcgcacgtagccgtcggggcctttgccgtaagcgcccgtcacatcgccttcgtcattctggatgagcacgacggcggttgtgctgtacagccattctgcgccgtctttcttcgattcgtcgatgctgtattgcagaatgggaccccaagcaggctggttttcgcccttgccgagcgtgttattgaagtcgcggtacgagatggtgccgggaaacgatgtgtagccgctgtggttgatagcgacggcgcgccgtccgttgggaaagctgtagtacacggaatactcgtcgagctcttcctgcggtgcgagggagcggatccagtcggtaacctcgccggaacgcgttgcgtacatcttggcgatcgacggcatggaacggcagtacgtgcgcagctgccattcgttcaaaacctgcatctcgtcgaccgcttccgccccggtatcgagatacgcctgcgagttgaccgtgccgctgtcgcagccgatgggtgcccaggtgtcttcgggctgcttttccatcacgaccactttcatgccgagctcggccgcgcgccgcgccgcgcatacgccgctgttgccgccgccgatgacgagcagttcggtgtcgatggtgttcgtgacatccgcctcgtcgacggtgggcttttcgccgagccatgacggattggcggttccgtctgcacctgccgcagagttgttggtgcttgcggcggcttgtgcggtctcggcggtcgccgtgtcgctcgttttgccgggcgtgcatccggcaatcatgccggctgcggcggcgccgacgccggcgagtgccgcgcccttcaagaacgaacgccttgatacgcctttgcttgcttccatgatgatccctcctcggggttcgtcgtgtctgtcgtccgattccttcgtttcggacgggctcaccctaccagcgcacgccttaccaaaaacgggtggttttgccctatactgcttcctaaggaggaaaaacgcatggatgaggctcgcggcaaagagacgaaatacgggcagcgcatcgcgatgatctgcgcaaatcctctgacgatcggtttctccctctttctcgtgtggcagaacgcctcgctttcctttctgttccccagttcttcgggccgggtcgtctcgccgcttttcgtcggcagcctgagcgtggcgcttcttctcgcgctgtgctttgtaagctacaagcgcgatgcgggtacgttcacgcccgcatggtcgatcggcctttcattcatcgccacggttgccggatgcgttgcatgcgtgtttgtggcccagacgcttttgccgctttggggcatctacgttgcggcggcggtgctcgggttctccgcggcaaccgttgtcttcgtgtgggcgaccgcgttcgccgagcgctcgtcaagcgatgttctcatcggcgtgtgctgtgcgttctttgttgcaagtgttgtggattaccttgccatgaacagcggctacttcaccattccggtgattgtggtggcgtgcggtatcggttcttgggtgtgctatatgctcgccgtacgctcgaagccgctcgacgagcgcccgttgcttgtgcgtccatcgaacactaaggagttcatcaagctgggtatcggtttggccgtctttgccgttgccctcggcattgtagcgggcacgactgccgatgttgcgaccgaagagtccatgcgcgatctcaacgagaatgccgcactggcttcgatcgtcgtttcgctcgtgtgcttcgtcgcttcggttgcgcttcgctctcgcatcgagccgacgacgctcgtcaaggtgttcgcgtcatgcctcgttgtcgtgatactgctcaacatcgtcaacctcgatcatgccgatgtttggctgtcgctcacgatcttctcgtggacgtttcttcggctgtgcgtattccttgtgctcgtcaacatcgatcgctgccgcatcgtgagcttgccgatgctcttccctgcagtgtggaccgtgctctgggtgggctacgcgggaggcgtgttcacggggcagaacatcctgccgttggctgggggtggcacgcaggcgatgctgaacagcgtcgtgctggttgccgtgctcgtggtgttcggggctattctgcttgtgggaaatcgcgtgaccatgagaatgggcttttccggggacgatgccgctttggcgccgggtgcgccgggtgcgtcgaacggcgatgtttcacgtgaaacatctgttcgtatttcggaatctgacatccccgattctgaagtgggaaagcgggaggccgttcaagaacgggagacgctcgaagatcggtgcgcccgcattgctgcaacgcatcagctttcggcgcgcgaggccgaagtgctcgtatatcttgctcagggtcatacgcgcgcgagcatcgcaaagaagctcttcgtatccgaaaacacgattcgggagcatgtgaagaacatctacaagaaactctacatccattcgcgccagcaacttatcgacatggtggacgctcgtcgctgatcgggcgttcgcgcctcgcccgcccgcgcgctatactgacgcaaacgggaacgagcaccgaagcgaggcgatcatggattacgtgctttcaaactgcaacctgttcgatggaacgtcgactgaagcaaacttgcgcgaaggcgtcgatatctacgtgaaggacggcgtgatctcggccgtggtcgatcacggcgatgcggagccgggctaccagcgcatcgactgcacgggaaagtacgcgatacccgggcttatcaacctgcatgtgcacctgttcggaactggcaagccgagcaagacgctttcgggcggcggcagtgcgcagacgcttatcaagattacgaagacggcgctcggcgcgaaagtgctcgactcgatggtgaaatcgggtgcgcaagcccagcttgcttcaggtgtgaccaccgtgcgcgcagtgggcgatttccattggtccgacgtgcgtctgcgcgatcgcatcaacgcgggcattgtgcgggggccgcgcctgctcgtatcgggaccggctattacggttcccggagggcatggcgacggcactttcgccgtgacggcaaccgaccccgatgatctgcgcgcgctcgtgcgcagccacaaagagcatggagtcgatttcatcaagatatgcgtgacgggcggcgtaatggatgccaaggtgaaaggcgagcccggcgaactcaagatgagcctcgagcagacggcggcggtgtgcgatgaggcgcatgagctcggcttctacgtggcaagccataccgaaagcaccgaaggcgtgcgtgtggcacttggaggcggtgtggataccgtcgagcacggcgcgcctgcaacttctgaggtaaccgagctgtacaagaaagccggcgcggccgacatctgcaccatctcgccggcgattcccctgtgcaagctcgatccgtccgtgacgctcatgaacgaattcacccagttcaatgcaaatgttgtgttcgaggggatcgtgcaaggcgcgcgcgacgtgctggatgcgggggtgccggtggggcttggcaccgattcgagctgtccgttcgtcacccaatacgacatgtggcgcgaggtgtgctacttcgcaaaatacgttggggtatcaccggcctatgcgatccatacggcgacgcttttaaatgctcgcattgcgggaatcgaagaggagacgggaagcatcgaagcgggcaaatgcgccgatatctcgctttacgatgccaatccgctcgacgaccttgccgtgctgcgcgcgccgagcatggtggttgcccgcggccttttgctcgagcatccgaccgtcaagcgcatttcgcttgtcgatgcagagctcgataagctgctgtagggcacgggggcatcgagatgccttcgcgagcgccgcacctgactcgtccggactgtccgcgccgagcacgggttttgtgcgtgaagagggcgttaccccgtctgcccgcgaaatagatttagattgccgttggtgcacaggcgtcggtcgttggtgcaagcgtcgggatggcggtgccagacgttcgcgtgcgttaaccgcctcctctagagaaagcttttgggcgacgtgcgagctttgccgaaggcaggctggcgcggcacgcggaaggcttcaatctgcacagaaattgtcagattcatacatgtgggagctcggcagaggccccgatcgtgtccgctgccgcgcagcagggctatctgcaggcttgtgagctgggagaatgctcgctcgattttcaacataggcgcccaatgcagcccgcccgcatgttcgcatgtatgaatctggcaaaaaacgtgcagattaaggcgttacctgtttttgccacctgggcgatgtcgccactattgacgatgtcgccgctattgacgatgccaatgccgtcgctaccgccgatgtcgatgctgccacattctcctacggggaggcgttttccatgagaatgtgccttcaatcaagatcacgattaggtaacagccccgttaccgcatcgtttccaacgaaattcctgatggggaacgctctttttcagggcgtaccatgaattcgaatctgtcgctttgcggaaaaccgctgcaaagtatcctaaatggtataaaaaaagtatcatttacgaacacaagcgatggtttcggtgctagaatgacgtcaaagtttccaaggggaaacgccgctgtgttatgtcgctagcgcgttgggagcaggtcagacatctcttcgtgtagctgacggaaagcgggttagacgcttgagtaaaaagggggtgtgcgatggagatcttttctgatccgacaatgttggcaagaatacagttttacctgacagccgggtaccacttcttctttgtgccgctgtccatcggaattgcattgatcctagccatcaacgagacaaggtacttccggtctcgcagcgaaaaggatgctgcggcggccaagttctgggtgaagattttcaccgcgacgtttgtggtcggcgtggccacaggcatcacgatggaattctccttcggaaccaactgggcagactatgcccgcttcgtcggcgatatcttcggtgcgccgcttgcggcagaagcgcttttggccttcttcctcgagtcggtgttcctcggcgtgctgctgttcggccgcgataaggtttcgccgaagttctatctggtatcttcgtggctcgtgttcatcgggtcggcgctctctgcgctgtggatcctgatcgcgaattcgtggatgcagacgcctgcgggtgccgagttgaacgccgatgggacgcgtgcggttatcaccgatttcttcgcggcagcgttcaatccgtcgacgattccccgctatacgcacacggtcgacgcgctcatcatcatgggggcgttttttgccattgccgttgcggcgtactacctgcgcaaaggcaagcataccgatttcgccatgaagacgatgaaaatcggcgcggcggtcggcatcgtgtcgagttgcctcatgcttgcgttcgcgcactctgccgccgtcgtggttgccgaagagcagcccaccaagcttgccatgatggagggcatgtacgaatcggaggttccgccgctctacgcgttcggttgggtcgacgaggagtcgggcgaggtgctgaccccgttctacattcccggtggcacgagcttcttggctacgggcacctgggacaccgagtttttggggctgaacgatctcgccgagaccgagcaatatgctgacctcgacgtcgattcgctgccggtgaacgccgtgttccagagctaccacatcatggttgccatgtacggcctcatcatggtgtgcgtgatcctcgcacttgtgttctcgttccgaaagggaaaaatcaagaacatgcgctggctgcaaacgctgctgctcatctctccggtgttcccgttcatcgcgattcaaacgggttggttcaccaccgaagtgggacgtcagccgtgggttgtctatccgtctgcgacgggccccgacggcataagtctgctcacggcgagcggtgtatcgcaatcggtttcgtcggttgagatactggtgacgctgctgctgttcgtgctcgtgtacgcgtttatcgccgtggcgtgggttcgcatcgtgatgcacttcatcaagcagggtcccgtgctgactcctgcgggcgtcggcattctcggcgctgaagacgattccgatgctgcggctgcaacgacgcaggctggcgacggcaaagcttcgaaggcgaaaggtggtgagtagtcgtggaaatgacattcttccaagttctctggttcattctgatcttcgttctcatcggcggctacttcgtgctcgatggcttcgatctgggtgcgggcgccctgtatccgttcgtcgccaaaaacgataaggaaaaggcgatcgtgcgcaggagcatcggtcctgtatgggacggcaacgaagtttggctcctcaccgcgggcggcgctctgttcgcggcgttcgctcccgcgtacgcgacgacgttctcgggtttctacctggccattatgcttgtgctattcagcctgatcgtgcgtgcggtttcggttgagttccgcggatacgatccgaagtggggcggtgtgtgggacaagctgttcttcatcggctcggcgcttccgtcgcttttgttcggcgttgcggtcggcaacatctacgcgggtattccgatgagcgcgaacggcgactacatcggcattccgctgctcggtcttatcacgccattcacgttgctcacaggtttgctagggctctcgatgttccttgcgcagggagccacgtggctcgcactcaaatcaccgaagccctcggcgttgcgcgatcgcgcagtgaaggctgccttcccgattcagattgtggcgctcgcgctgtttgtgatcgtgtcgatctacggccacttcatcatccagcctgcgatggctcccgagttgacggtgctgcgcttcctgtttgcggcgatcgtgcttgtcgggatcgtcggttccatgatcatgatgaggaagggttccgatttgtgggcgtttctctgccagtcggtcggcgcgttcttcctcgtggctctgcttgccgcatcgatgttcccgaacttcgtggtggcatcgcctgacagcatcgggccttcgatcacgctcatgagcgcagcgggttccgagcttgctctcatgtggatgaccatcatcacgtgcgtcggtctgccgctcgtgctcatctaccatgtcatcatctaccgcacgttccgcgggcgcgtgaaggacgaggatctggggcactactagggacgcagccgaaaggcgatagcgttttggcatagctgacaagtaggagccgctttcgattggaggcggctcctctgtcgtgcatgctcaatacgacttgcatccggttgcatggttggcgtcattgccatttggcgctttgcgcggctgcgcgcgcgagcgttttagcgcaaacccactatttgactttgatgagcaccatggcgacaacggctacgatagccaaaggcacgcagagcgcgaccgatgccgtaagccatcctaggctgctcgagagtccgccgaacagcggggagccgatagtcggcgcgaggttttgggagatctgcatgacgctcattcccatggcgatggcaagcgctccgccacccttcttctccatgatctcgggcgtcatcggacgcgtgccggaagcgaccaagccgcccatcaatccgaagatgatgacggaaacccacacgagcgtgaggttgtccatgaaggcgatggcgagcgtgcaggcgcacagtgcgaatgctgcgacgacgaagggcttgcggcgaccgatcttgtcgtagacgattcccatgatgggcatgatgcagatggtgagaagcggcatgatggacgtgatggcgcccgcttcggcgttggtcatgccgatgccttgctcgaggtacatcggataaaagttcatgaacacaccgttgcatacgaagttgaagcagaagaacgccaggcaaagcagccagatctccttgttcttgaggaacttgagcccgcggatgaagtatcccttctcctgctcgacctgctccacggcgtcttcgctcgatccgttttcgggcatcttgaatgcaagcagaaccacgacgaagatgactgctgctgcgatgacgcacatccaccatgcgccgcgccagccgaacgcatctgcaatctgcgggacgaccagcatcgctaccgtcgaaccgaggggcatccacgtgcaccagatagccaacggcagcgcgcgcctgcgctcggggaaccaaaccgaaatcgcggtgggggcggaaactccgataagtgcgatgccgcatccttcgatcgcgcggctgaaatacagaagcggagcggtttcggcaaacgctccgatgagcgatccgacgcctacgcaagcgatcgatgctaggatggttttcttgatacccattcttccgcacatccaagcggcgggaatcgccaggatgacgccgcatacggtgagagccgacatgagccatccgaacgaagccggatcgaggctgaacgcatccatcaaaggcttggaaagcgtcgtcaccttgaactgcgccataggcgcgataaagcttgctagaaaaacaattaagagaatcagccacgcatatgggcgaaccttttgttcgcttgtacccctcgtttccacaagacactcctttcaatgtttcccaaatcgccttttggcgcttcggtaagccaatgctaggttgtgaacgggggcgtgtctgtcccacctagaccgcgattttgcggtcggcgacatgtcgtatcaaaggtattacagcacctatgaactggggatatattagaatttgccgatttgcgggcggggttatcgctaatcctgccgctgctgcagaagcttctgctcgatcttttcgacgtggtcgagcagctcttggtgggtattgacttccagtttccgatagatccggtacttatgggtcttggcggtgttttcggagatgaaaaggctgtctttgatgaacttcacgtttcgcccgtgggcgagcatcgcaaagatctccttttcgcgtggggacagcttgtatgtggttgcgatcagctcgcacgcttgctcccagctgttgccgcttcggtcggctgggtcgggttgcgccattgtcgactcgggtttgagcaggtccatttcgagaagcgtgttcgtggcgtacggagcgatcgacaaaacgatggtgtagatgacgatccagccgaagaagagcacgaaaggatgggcgaggtcgccgcccgcaagcgcatacgccgaggctatgccccatccgacgcagattcccgctgacggagcgagcagtcctgcggagaagtggcgaggcgaaaccgtttcctggtcccgtccgactgcgatgatcagactccagtagaaagcggcatagtaaaagaacatgctcgacgctatgcaggtggggatgaacttgtaggcgtcgggcagggtcggcacaaggaagaagcacaatgcggtgatgggaaagtacagtcgttcgatgagcgtgttcgtgagcgcgcgcttgagaaccatcgcggttgcaaggaaaacgattccgccgataaagctgccgcttgcggtgactcccagcgtgccccacatgccgaaatgggcaatgcagtagcaggtgagcacgctgaacgtgccgccgactatagtgggcgaaaggaatttgggcgcaagggtctcaaatccgctttcctcacgcggcgcccccgcactgccatcttgcctgctgtgcgccgctgcgaagaagaacacgagcgagacgacgaagtaaacgcctggcaggaaggaccgaagcggatcgggagcaaaaagtgcgagcgccccgaacagggagatgcacatgatcgcgctgcctacggagacaagcgatatcttgcggtttccctcgttgcggtctacgcgagcctgcaacgatcctaccaggggaaagaacagcgcctgccccagcccccaaagcgcccacgccgcagcttgcatgagaagggaagcttgcaggtcgaatgcagatgccgccatggcggtaaggagtgggacggtcaacgccgtcgagagggcgattcttcccccctcgcttttcggggatcgacggaatttcatgcggacggctacaaggtgagtgcaggcgaatacgagcagaccgcagaaagcgggtagaacggtgagcgtcgagcctacggcgtcttgggttttcacggggaagatcagcgtagtcaccagaaacgaactgtagagcatgaaggatatcgttgccatcacgccgaaaatgctttccggaattgcatcgtcggagtagccggaatccggtttcttcgcttcgtcagccatcatttccccctatgtagtaccaacgacatgacacgcaaatcggtttttgccatagttcggcgactgtgcaagatcgccgccgggactatggttgagcgcgtcgagcggatggtgttttcgggtcggcggttcttcgtagctgtcgaagcatgacgaactggcttgagtgacatcggacagtgtagcaccatccgcgagactcgacgagtgcaagcaagaacgtaggaaaaaggaggagtctatgggagatgtgagaagctataccgatcctgcagatgtcgaccgtcatacatcgtgtacgaccgccggtccgatgttcgttgacgtgaaagacggcaagatcgttcgcgtagatccgctttcgtttgatcctgaagaggtcgactcttgggaggtcaaggtaaacggcaagtgctatcgcccgccgcttacgcttccgcttctgccttggggacaggcgtacaaagcgatgcagtcaaccgaaacgcgcgtcaagtatccgatgaagcgaaaagattgggatccccatggcgagaggaattcccaaaaccgcggtatcacgggatacgagcgcatcagctgggacgaggcgtacgatcttatcgtggaggaaatgaaccgcgttcgcgcgacgaagggcccttcgggcatcggctactgcgacagcgctcacaccgagtggggaagcttgcatttcgtgttcagcgacgtgtaccgtttctggcatatggtgggcggtacgttcatcgagtttaccccgaacagctgggaggggtgggcttgcggagcgccgtttttgtggggcgactggcaagggcacggtttgccggcggctcccgattcgctccaagacgtttcccgcaacagcgagctcatcatcctgtggggcaacgacccgctcatgcatagcatctacagcggcatcgacacggcgcgcctgtggcagtactggcgcgatctcggcaaggagatcgtcgttgtggaaccgttcctcaacgagacggggctgaactacgccgataagtggattcggatataccccggtaccgacggtgcgatggctgcggctatcgcgtacacatggatcaccgaaggcttgtatgaccaggagtatctcgatacccatgcggtcgggttcgacgacgggcatctgcctgacggcattcccgacggcagttcgttcaaggcgtacatcctgggcgaatgggaagacggcattccgaagacacccgaatgggcttccgagatatgcggtgtcgaaccgcgcgtaatccgagctttggcacggcagtggggcaccaagccgacttccttgtggtgcatgcagggcggcgcctgccgtcgcgagttcgcccatgagttcacgcgtatgatgggtgttctgcagatcatgcaggggctcggcaagcccggtgtcggcgtgcagggaacgtgtctgtctatttcgggtccctacgatggcgtgaaccagatcggtccgacgggatatgccgacggtggcatgaacgtggtgatggagaagtactatcccaatcccgttccgcagaagataaccttccagaagttcaacgactgcatcaacaacgctccccagcattggcagggaggtcatcaggataacttcaacgccgacatgttcctcgagcagatggactatccgatggcaggttgcgccgaggtcgagttcgtgtggttgcacggctcgacgctgaccaacccgcccaactatcagcatcatatcgaaacgtatcgcagcgagaacatcaaaacgtttgtcgttgcggctccgtggttcgaccgcgattgccgctacgccgatatcgtgttgcccatcaccaccgtgttcgagcgtcaggacatcaccgagcccgcttccgtcggccagtacgttccgccgtcttatgtcggtcttcgcaacgcggttttcacgcagaaatgcgtcgatcccatcggcgagagcaagaccgacctgcaggtttacaccgacgtggcaacgcgtttgggacttggcgactactacatcgaagggaacaccgaagaaacgctgctgcagaagatgttcgagcggacaagcattccgctgtcttacgatgagttcaaggaaaagggctattacgtgtggccccagccggaaaactacgtggagtgcaagcagttccagaagttctacgaggatcctgagaacaatcccctcgatacgccttcgggcaaagccgagatcttcagcatgcgcctgtacgaacactacaacaacaattcggagattcctcccgtgccccatttcatccccgagcgcgaggggcatctttcggaggatttgaagcagacctatccgctgcagatgctcatggcgcatccgaagtatcgcttccatgggaagtacaacgacatcgaatggctgcgcgagaactacaaagtgtacggaccggatgggtatgggtacgagccctgctggatgaacccgatcgacgcagaggagcgcgggttgtccgatggcgatatcgtgctttgccgcaacgatcgcggtcgtgtgctggcgggcgtccgcatcacgaagcgcctgattcccggagtcgcgtggctgtcctacggcgcctggcaggatccgttgtcggaagacgcccactcgattgaccgcggcggcgatgggaacgtgctttccaacaacgcccccatgtcggtgcaccatgtcggcggagcgttcaactcggtgctcttcgaggttgagaaagccgatctcgatgcgttgcaggtggaatatcctgacggattcgctggcaagtatcgtacgtggaacagggaggggtaagccgatgaaaacgctattgatcaatgcggagaaatgcatcgattgccgcaattgccagacggcatgcaaagacgagcattgcgataatgattggagtccgatcgctgcgattcaagctccgaagcagtactggatcaaagttcaaaatgtcgaagcaggagacgggtcgcgcgtggagatgcagcgcacgcagctcgtgtgccagcattgcgccgacgctccctgcatgaaggttgccaaggacggtgcggtttaccgccgctcggacgggcttatcatcatcgatcccgaaaaggcgcagggtcagaaagccattatggaggcatgcccttaccatgcggtgtactggaacgttgagcttgacattccccagaagtgcacgatgtgcgctcacctgcgcgacatcggtcgggagccgcgttgcgtgaccgcctgtccgaccgacgcgctgaagatcgtcgagtcggaagacgtagttgattccacgcttctgccgtcgcctgtcgagcatcttcaccctgaatacggcacgaatccgcaggtcctgtatcagcagctgccccggccgttcattgcgggggagacctgctcgcttgatgggaaggagtgcttgtccaacgtgaaagtgaccgcgacccatcagatgctcgggcttcggtactgcgacgttaccgatgcgttcggcgagttcaaactcaaggggcttgagcccgggtactacaccgtgtccttcgaaaaggacgggtatggctacaaggagctttcgaacatggacgcctccgagtcgatcaacctcgataccgttaaacttaccgcgctcgtctaggcgtagcgcgaagaagaaaggataggatgccatgtgttttagaccaccgaccgttgaaacggcaagccctgtttgccctgaatgcgggcacgagaacttcatcggtgtgacgatctgcgcccaatgcggagctagtctcgcttcgggtcctgtaggaacccagtcggcggaaagccgcgattggacgccgggtttggacttccagcaaaacgccgctccgatggggtctccgaagccgccgagcgcaccgactgcccctggggctcctgctgctccatcggcaccgaagccgccgaacgcttcatagcgatgcaggcagggacgcgcgatcgcgtccctgctttttgttgtcggagcgtcgtcgggtttgcatctcatcgaaaaagcggcagcttaattgcaggtgcgtgtgcgagcgggcgataatggggttgaagacgagacggatcattcgcgaatgcaggcgcgcatacgcaggacggacttggcaaggagccggcatgacgaaaaacgcagcaagcgaaacaacctgatcgcgatgcgctgtatctggtaaccgatctggtggatttctacgagcgatacggctggcgctttctcggtatggtgcggggcgatgatggctgcctcaagcgcatgtacgcctctaaccctgagttttgaaccgtacatttccgagcgtatttttcctcgtcgttcccgaaaaactgctttcttctgtttttccgtccgtcgcttttgatactatggcgtcccttataatgacgaatatgccgcaggtgccgaatgcatgctgcgggcgcgccgcaggagtgccgcgcatagaaaggacgacccatgtttcgagagatacgcaggagcaggcaagctcttcccgtggaagaggggagagaaatcctccatcgcaacacggcgggggtgttgagcctgcatgatgagctctatccatacggagtgccgatcagctacgtttacgaggagagctcgctcgcgccaggagcgctctacggcactgtttacttccactgtgcaaccgcgggtcataagctcgaggctctcggtcgaaacgaccgcgtgtcgttttgcgtgatcgatcaggaccacgtgcttcccgagaagttcacgactgagtttcgcagcgtgatcgcgttcggcgttgcccgcgttgtttccgataacgacgagaagcgccacgggctcgagctgctggcagagaaatacagtcccggctacgattccgacggtgagatcaaaggcgaatggaaccacacgagcgtagtggcgatcgacctcgattacttcagcacgaaagaggcgatcgagctcgtgcgcgcccgcgaagcgcagcccgagggcgcggaagggtagcggcacggcgggtttccgctttgcgcggcggccgatctaagtcgatcgtaaggggctatcgaatctgctcgaaagcccctttctctttttcccgcgaaacgtcgattcgacgtatatcacccgaatcgacgatgcgaaccaaccattcggaggattttccgactcctttttctgcagcaccatatccccagacgagaaagccgcacgtgatgtttcggatgcgtcgtctttctttagggagcgtttcgttcgcttcaggcagatgcaagcgcatcgtctggttcgggcggagcaaaaacggtattgcgatgggagaaagcatatgaaaaagcaaggacttactcgccgttcgtttcttgggctcggtgcgacggcgacggtcggtgcactggcggcaacgacgatgagcgcatgcgcgccgcagccgacgagccaagaagcccaagaggatggggtggcggctccgacaagccaacaaagcgctgcgcagcgcaatccgcaggacgactcgtacaccgcttacaccaccgactactcgaatcttttcagcccgctgactgtgggcggtaagacgctcaagaaccgcatcgtcaaggcgggcgccacgtctcgaaccgtttcgacgggcgcgggtttctccgacgatgtgaagaactactacggttacatcgccgagggcgggaccggcttgatctggatggatccgttcgttgatttcacaggcaaggcgccaagcggcaatacaccgcttgcgaccgatgaagacgccgccttgataaaggagttcacggattacgtgcatgagcagggtgcgcttatcggcatgcagctcgtgggcttttggaaccaatgctcttgcgacggccccattacggctccgttcgagaactacctcgcgacccgcaagatgatgagcgtcgacgacatccacgcgttccagcaagacttcatcaatcgaagcgtcatgctgcagaaagcgggattcgacggagtcgagctcaacgccgggtgcgaccacacgtttgcctcgtttctctcgcggcactggaacacccagcgcgacgatgagtgcggagcgcagagcttcgagaaccgcgcccgtattctcaccgagctcatcaagggcatcaaagaagcttgcgggtccgacttccttgttgaagttctctataacggcatcgaagagaacgtcgaatacctgggcaacagtgacgattgcatgaaggtcgccgaggcgatcgagttcgcgaagctgttcgaggaggcgggcgccgacatgctcgagattcgctatgcggctatcggctaccatggcggctttttccccgacacgttgcacctgtgcgagccgggcaacaccggctacgggaccgctatcgatttcagccgtcatttcgagggcatggtgaacggatcatacgacggtgcctgcgcgctgctcggtttggcgaccgagatcaagaaggctgtgagcattccggttggcacggtcggcaatatggatctgcgtcttgctcccgatgtcatagacaacgcgttaggcaacggcgatatcgattacatcgtggtcaaccgtgcgctcatgtgcgatccggagcttcccaacaagcttgcggagggtcgtcgcgacgaagtcgccccttgcaatcactgcattacctgcctgcaggcggtgcttcctcaccctgtcaccgtaggctgtcgctgcaacgctaccttcggtcgcgtaaaggatggcggtatcgaaacgagcgctcgtccggcacctgccgagactccgaaaaacgtcatggtcgtcggcggcggacctgcgggtatggaggctgcgcgcattgccgccagccgcggtcactccgttacgctctatgaggaggatggttcgctcagcggacggatgacattcgcctccgcagttaagggtcctcatgagaagatcgccgacttctgcgcgtatcttgaacgccagctcgaggttgcgggcgttaccgtcgagaagggaacgaaggttgatcaggcgctggtagacgaagtgaagcccgatgccgtcatcgtcgccgtcggcggaaaccgtcccgagctttccatcaagggcgcttccgacagctccttggtcatgagcatcgaggatgcaggggtcgcttcggatatcgcggacgatgttgtcatcatcggcgacaaccaccatgccatcgacatgtctatcaacctggtcaaccagggaaagcacgtgaccatcctctcgccgcgcaccgaagagtttttcgatgtcgagcatccctcgtggatcaggtacagtcagaaggcttggctcgaaagcaagggcaccgagatcttctacgagtcggaaatcgtgggcatcaccgaggaaggggtcgagctaaagaccacctatggaaccactaaaaccatcaccgccggcgcgatcgttaactgccaggcgatggagcccaacaccgatcttttcgatgcgatctcgaagagctacgaagcgtacaacgtgggggattcggcggaattctcgaccattgccgaagccatcagcgcaggcaaccaggctgcacgcgccgtataatctgacaatcggctatttttgcgagagctgtgcggttgctgtcatgcggctgtgcggctctcgcgcttatgccgccgatgcgcgtattgcctactggctcctggagccgaagatcaggttgatcatctcgtcgcgggtctggatccccatcttcttgtagatgtgcttcacgtgggttttgaccgtgcttgctgaaatgaagagcgcgcgaccgattccctcgtaggtgcgcccctcgatcaggtgcgtgaggacttcgcgttcccgcttcgtcagaccgaacgtgtcgccgatgttttcgctgattgcctctgggacgggcaaggcggtttcgcgggagtcgagtatctgatccttcgcaagcacgacgacgttccatccgatgtacagcatgagcacaacacccagaataccgtctaccgctgttgcgtcgacggcgaatgagaccatcttcccgattgttaccgcaacgccgtagacaccgaaacgcgcgagaattgcacttgcagaagatacgccgttaacttgggaaattgtaattaacgcagtgatcgaacacacctcgaaaaccgcgagggcacagtagtagacgaagctcaggatccaatcgaacgatccgagctcgctcgtgtcgctgaggaggagcgatgcgagcagaaggagagtcgagattggaaatgctatcgcatagaaggtagagtaggacttcacgtcgcccttgccgaatttcgcaaagaacacgatgagggagaagaggagcacgacggcgatcaccgaggttggcacctcataagacagcgcagcgctttctccccacgatagccccacgccgaagcccacgcatgccatagcgacgagcggcatccagagccttggtatgaattccctgttcaaaggctgaaacggttgagtctgattcatatcgatccgccatatgtcggatggggcgatgcgtgcggctcggtacagcatcaaaaggctgattcccatgatcgcgcagaagatcactgcgggaacaatcttgccgtatacttcgacatacgatagcgcgcgaactacggtgctgatcacaagtgcgcccgccatggttaccatcatcgtggagaagtgcaggcgctcgtacatgcgcgtccacatgagcgcatagaggacgaaccctgctccgaacagcaggcacgcaccggtttgaaatgccgtaacgaccgattcgtgcgccgtcagtcccacgaagtcgatcccgattcctccgagaagcaaggctgctgtaacgatgcaggtaagaacggtgggtcggaagtcgagcgatttggcgaagtgcctgacgatgatgtagatgcctacggcagcggcagcgatggcgacctgaatgaagatagggtggaacctgccagcttgttcgacggagaagaaaagtcggttgaagaagagatatgcataataatagtatcccgaaaaaagcaaaagcaacggcatagaaagccgtttccccactgcggtcatcccggtgccccctaaacaagcaagcgtattgagcgaatctaaggaatatattacgtgcaggttcttcttgcaagtacatcggcaatgatgatctttgcccgatgccaaattaactaagggttttcgtgtaacccttagttaatccttgtacaagtaagggttagcgtgcgaattgttcaaaatcagccggcgacgaacctccccttgtcgatgatcagctcgtcgtcgaggtagagcgtggggttgaggatgatgccgtcgtagtggcagtcggctttgttcgtgccgccgaacgaggtgttggtgccgaaagccacgtgcaccgtaccgtagagcttctcgtcttcgaggatgacgcccgagaggatggcttcgtcgttggtgccgattccgagttcggcgaccacgccattttcggggcgggcgaacagtatgcccagatcgtcggcgttttcgccttccatcgcaaccaggcgcccgtcctcgatcgtggcggtaagcgggctttcgagcttgccgacgccgaccatcgacccgtcgatgaccgtcgtgccgctacctccgccttcgacaggtgcgatgtaggcttcgcctgaggggaagtttccgctcgaccctttttcccgatacacgccggggctcgcaacgccgcaccgtccgccgaggtcgagcgtgagcacgtgaccgtccttctcgatgcgggcgctcttcgcggcggtaagcttttcggtcaggtgcagcgtgcgcgcttctactttcgtgtagtcggcgcaggacgctccggcgcgcagcatgtccatggttataccgggcatggttaccacgcgcgttcctgtagcggcggcttcaatgcgcgcattggtgtgcgtgatcgatttcgcggtggggcagagcgccacgtctgccgccttcattgcggcggcgactgcggcgggcggttcctgcccggcaacgttgagctcgggcatctgcatgacgagcgcggtgcggccaagctctcgggcggcgcggtagaacagctcgcccacttcggccgtggggtcgtcggtgactacgagcagggtttcgccctccactaaacacaggctgtcgaggatgattcgctgtgcgcgttcgataagttccatcagcggattcctttcttatggcagtaatagcgaacaaatgtttcacgtgacgcattgcggttgcgggtgccgtggttggcgttggcgcaggcgcctcgttcgcgcctacagccgccgatcacagcagctctttcgccgcgttggccagaaccgcgcgcggcagcacgacggacttgccgcttgcccgctcgatctcatgcgccatgtccatcgaatatccgatgcaatcgagcacgatcatcgcggcatcggtctgcccgatagctcgtgcggcgtcgatgcgaggcttggcgggcccgtagggggacgccgcatagaggtcgggctttcgtccgagcagtcgctcccagtggtttccgatttcgggaatctgcgcttcgtcgggaacgacgacggcgatcgtttgcatcgtgccggtaccggccttcgcggccttctttgcgcccgcgccgccttcttccccaaccgcgcgctttaccgcatctgccagtacgtcgttggggtggatgagcggcacgtcgcaggcaaacgggtaggaaaggttcgccgtgcacagcagcacgacggcacgcgcaccccgcgaaacgacgcggtcgatcgcctgctgcacgagcggcatgaccttcgctcgcgatacgacaacgccgctttcgtcgcgcatgcgggaagccagcacggcttcgccatccctaggtgcgaccagcgatacgtcgtccagcttgtcgagcgcccccgcttcgacgattgcaacatccgatcccaaaagcggtgcaagatcggcggtcacatcggttcggggcgcctgcccgattgtcacgaatccgataatgtcgcatccccgattctgagtgggggcggggaattcggcgcttggcgcgccggtcgacttggcggaaggcatggcgaacaacctgctttacgccatctcgttttccgcaggcagcgcacccatcgtttgcagggcggccatcgaaccgtagcgcttgccgaacagctcgaactcttccgcatcgaaaaacgagcaggatccctcgccgaatgccttcgccgcttcgatcatgaacgtacccgcttcgtcgaggtcgctcagatgcgtggcgcccgttgcacagccgggcacggcggtctcggtggtgatggcgacccctacgacgggcgcatcggttgcggtcgcgggctgcaggaccgagttgaggtgatataggccgttgccgtatggcgtgatgtcggccatggaaagcgcgaacacctggggcttgcgaccggtcgctatctccaccaggtcgagtagatcttcgctgacgcgcaggataacgccttgcttgaccgtgggggagatggcgaacccgcggtagttggcgatgcggttgcccttggtggtgtccaccacgaggatggcgtcgagttcttcggtgacctcttctttgttaacggcggcggttgctacgggcgagcccatgaacggcacgggcttgtgcggcatcgtgggggcatgcgggcacacgtgggtcgagatgaacacatcgcctgcaagaacgtcgccctttgcgtgcatgtcgatgagtttcgcggcgcaggcaagcgcaacgagcgcgccatcgccatcggacacgaagccgatcctttcgggccgagcacccaggccgccaagccgtccaagcaggccgatggtgggcgcatcgcctcccgtcgactttccatgcgcgcccggtatgcggatgcgcaccatatcggtttcgcccttttcgcttgaaagggcgtaggtttccacgttgcatgcggggtcgatatcttcaaggaacgccttaaccgtttcgccgctcgcggcgggcgaatcgagaagttcgtataggttgagaagatgtttgagaagcatcggtcctcctttggcgtgcgtatcggatcatctcgcatgaagacacttgattttacctcgtattccatcgatcttcatttgctcttcaggtaaggttatatacaatctcattttgcatacatttgtctgcgcagacggtatgagtttgaaaggtgcgatgcatgagaaggatgatcggtgtcaaggagatcgaggacatggcgctcggcgcaacggttctcggcgccggcgggggaggagacccctacgtcggcaagctgatggccatcgaggccatcaggcgctacggtgaagtcgagcttatcacccccgatgaggttcccgacgatgcccttgttgcggtttcccagatgatgggcgctcccactatcatggtcgagaagatctgcagcggagccgagccaatggcgacctacgacgaactcgtgaaggagctcgggcaggagccctacgccatctacgccgtcgaagcgggcggcgtgaactcgacgatcccgttcatcctggcagccactcgccgcattcccgtagtcgattgcgacctcatgggccgtgcgttccccgagctgcagatgaccacgctcggcatcaacggcgtgaaaggccaacctgcggtgcttgccgatgaaaagggcaacacggtgaccgtgcgcggcatcgatgacaggtggctcgagcgcatcgcgcgccaggcgacttcggtcatgggcggttacaccatcctcgcgtcgtacccttgcacgggcaagcagctcaaagatttttgcattcccaatacgccgacgctctgcgaagagatcgggcgcacgctccgcgaagcgcgcgagcagcatgccgatcccatcgatgccgtgctcgatgtgacgaacgggtttcggctgttccgcggcaaagtggtcgatgtcgagcgcaagaccgacggcatgttcgtgcgcggcaaggcggtcgtcgacggcctcgacgaagacaagggctcgcgcatggtgatcgaattccaaaacgagaatctcatcgcgctgcgcgatgagaagccggtaacgacggctcccgaccttatcatgtcgctcgatatggagtcgggcacgccggtgacgaccgagggcctcaagtacggcgcccgcgttgtggtggtgggcatgccctgcgctccgcagtggcgcacgcccgaggggcttgccgtcgtaggcccgcgcgccttcggctacgacgtcgattacattcccgttgaagagcgcatggcgaaaggggggcgggcgtaatggcgaaggcaacgcgtacctggcgtcttggaatcgacgtcggcggaacgaataccgatgcggtcatcatcgatggcgatctgaagcttgtcgcggcaacgaaaagcccgacgaccgaagacgttatgggcggcatcaaggccgccatgcacgaagtggtggaacaggtgggccccgaggcggcggagaacatcggattcgcgatgctcggaaccacgcactgcacgaacgccatcgtcgagcgcaagcgcctcaacaaagtggtggcgttgcgtatcggcgcgcctgcgaccacggccatcagttgcatggccgactggcccgaagaactgaaaaacgccatgggcgtgcgcgatttcatcgtgcacggcggcaacgagttcgacggacgcgaaatcagcgagctcggcgaagacgagattcgcgaggtcgcccggaccgtgcgcgaagagggattcgaatccatcgcggtgacgagcgtgttctcgccggtgtccgatgcccacgagaagcgggccggtgcgatcctgcgcgaggagctcggcgaggatttcccgatcacgctttcgtcggaaatcggctcgctcggatttctcgagcgcgaaaacgcctcgatcctgaacgcggcgctccatgatgtggcgcagactacggccgaaagcttcgaggccgcactcgatgccgaggggctccacgacgttgcggtgtacctcggccagaacgacggaacgctcatgtcggtcgattacgcgaagcgctatcccatcttcaccatcgcctgcggaccaacgaattccatccgcggcgcatccttcctgacgaaggaaaaggatgcagtcgtggtcgacatcggcggtaccaccaccgatgtgggcgtgctcgcccacggcttcccgcgcgaaagcatggtggcggtcgagatcggcgacgtgcgcacgaacttccgcatgcccgaccttgtgtcggtggggctcggcggcggctctatcgtgcgcaagctcgacgatggtcgcgtgacggtcggtcccgatagcgtaggctacaaggtgaccgaagaggcgctgtgcttcggcggcgacacgctgacggcaaccgatatcgtcgttgcgaagggcttggccgcgggcgtcggcgacccgtcgcttgtggcggatctcgatacggggcttgtcgaggcggcgtacaaggagatcacccgcatcatcgaggatgcggtcgatgccatgaagacgtcggcgggcgatgtgacggtgatacttgtgggcggaggctccatcctcgcgccgagcaagctcgaaggcgcagacccggtgctcaggcccgagaacttcggcgttgcaaacgcaatcggttctgcgatcgcccaggtatccggacagatcgccaaagtgttctcgctaaccgaaacgccccgcgacgaggctatttcccaatcgaaggaaaaagcgatggccgaagcgatcgaggcgggcgccgaccccgatacggtcgaggtcatcgacgtggaggatattccgatggcgtatctgggcgatgcgctgtgcatccgcgtgaaggccgtcggcgatttgatgctgtagacccatgcggcctacgatgcggcaggcgaagctcgcgagggtgtctcggtacggggtgccctcgccggttggaagaaacgggtgcggccaagcgccctgtaaggaggacccatggtcgataggaagatgaacgcgcgcatcgccctcgtgcaattcgagggaacgatctgcgatacgatcggcaacaccgcccatgcgtgcgagctcgttgccgaagcagccgcaggtggagccgatcttgtcgtgctgcccgaacttttctccacgggctacaatcttgatatcgtgggtccgcgcattctcgatcttgccgagccaatcgatggtccgacggtaaccgcgcttcggtcggcagcgcgggaaaacggcgtgtacctcattgcggggttggctctttccaaagagcagcttcccgccgttgcctacaacagctcggtgttcatcgaccgttcgggtgagcttatgggcacgttcgacaaggcgcacctgtgggcgcttgagcgcttttactttcgatcgggcagcgaatttcccgttttcgagaccgatttcggcaaagtgggcatcatgatctgctacgacatgggctttccagaggttgcgcgcatcctggcgctcaagggcgccgagcttatcgtgtgcccgtcggcgtggtgcgaggaagaccacgacgtgtggaacttcaacacgcaatgccgctctctcgagaacaccgtctaccttgcggcggtcaaccgcttcggcacggaggacgcgctctacatgggcggccacacccgcgtctgcaatccgcgcggcgcggttatggccgagcttgccgaagaggccgagggaatcctgtacgccgaccttgatttcgatgccctcaagcgattccgcactgcaagcccctacatgcgcgatcgtcgccccgaactttacgatgaagtgaagctcttgccgtagagcctgttcggaaaccgcatggcgaggggatcgaatttcgccgtcggcatgcggttcgtttcggaggctaggcccttgcaaaagataatatattaaggaaaacttgcggggggggggggcgtctctgctattgtttgcaaacgagtaaatataagcgtgcagataatcgatcgagccgccgaaaacggtgagaccacgtcgatccatcggtaccgaatggataaggaaggggccgagaacctatgggccttatcgacgacatcgctgttagcgccggatgcgagtatgtttctgaattgaagtaccatcccgggcgttatcctgcgttcggggttttgcgcgctatcgaagcgggctcttacgatgaaaaggagtggaacgaggctgttcgctacctgatcgacgaagaggcggacgattgcgatagcgatacgtgcaagaagcgattgctggagtttcttgcaagctagccgatcggctggtgcgatgccgtccgcaggcgtgcaaagaaagacccggcgcgatccaagcgcaccgggtcttttgcatgtctttcgaagcaggcaggttacagaacctgatcggtctctttgaactccacgacatcgacctttttgatgctggcgtagatcttcatgacaacccagtacagcacgcctgcgagaatgagcgagttgaggccgggaatgccgatgttcagcatgctcgtaatctggcctacggcgaaaccggcgatccagcagatgatggcgatcggattccagttctcgaccttggcaggcaactcgcctttggcgcgtgattcgtcgagcttcttgcggctgcgacgcagcacgtagtaatcgatgaccatgatgcctgcgaccggaggaatggcaacgccgagcagggtgaggaaatcggtgaagtagttgatgatgccgatgacggagagcacggtgccgacgatgccgagcgcccagatgatcgtgttgcgcttgaccgtcttgttgaagagcgcgttgatgagcgtcatgaggccaaggcccgaagaatacaggttgatgtcgttgagcttgaccgtcgaggcgacaacgatgatgacgccgatgatgcccgaagtcgccatcatgagatcgacgacgttctcggtgcccgtggcgtgcgcgagcatgacggcgagcaggttcatgccgagttcgccgatgaacgttccgataagcgtcatccagaaaacctgcgtgccgcctttgaggaaacgcgcgtagtcgggcgtgcagatggcgcctgcgataaagccgccggcaaccatggtggttgccgcgccaagcgaaagggccgctcccgggggagccatgctgacaagttcggccagcgtgtgatcctgcaggatcacccaggtggcgtagatgacgacggcgatgaacaccgggacgaagatcgtggcgaagttggcgatcgccttgataccgaacacgacgagcagcgtgatgccgatgcccgtgatgatggcccatacgggatactcgaaatctccgaggaaatcggtgaatccgacgatggttgccatgccctggccgaacacggcgttctggacgccgaaccagcccaccatcgagatggcgacaacgccgccgaaaagcgccgatccgcctttgccgaacccggtccagcgggaaaggaggctcgttgaaaggccctcgtgcgcggcagcggtgccgagtgcccagctgacaacctgcaacagcaccgagccgagcatggtggccaaaaacgcatcccaaaacgtcatgccgaagccgagcgcggctcccaacatgagctgcgatacgcagcaaatcgcgccgatcctgatgaagagaatcttccaaaatggctgcttcgcttcatcaggtacgcgcgatagcgagtagtcgttatccatggcaatacctttcatccgtcttccttgcggatcgtactgcaggcgcatggaggcccgcgatacgaattagcgtggaattataccctctatttgtttcgaacacgagaaaaagcgcgcacgggtacgttcggcggatgcctctatcatacgggctgcactgcggttgggcgggcctgcggtttacgaaaggcggctgccgagttccttcgccgccgccgctttgtcgaagttgccgcccgttgcctgcgtgagggcgcccatgacgcgacccatctccttcttagcggtggctcccgtttcggcaagcacctgatcgatcaggccgatcagcgcatctcccgaaacctgctcgggaaggtagccctcgaggatggcgacctgttcggtcagcgtgtcggtgcgttcctgatcgttgcccgctttgatggagccgtcaagcgtttccttcgtctgcttgatgaggcgcttgagcatggcatcgacatcttcttcggtgacttcgcggcgctcgttcacttcgatgttcttgacttcgccgtgaagctgccgaaggatggacaggcgcagcttgtcctttgccttcatggccgttttgatttcgtcttgaagctcgatgtatttcatggtgccctctttcagcttgggatacgcggttgcttcggatatcgaatcccagtataacgcaaagaagcgccgcttcgcgaagcggcgcttccgtgtgggcgaggtgacggggcgctgttacatatcgacgaatttatcgttgacgagatcgaccttgttggccttgttcttttccaggatcgccttcatgccggcctcgtctttggcgatgttttcgcccttcgggttcgaggtgatccgataccactggcccttgctatcgctgccaagcagccccgcgctgtcgcacacgtaataggcgttccagtcggttgcgttcggatccttgttcgttcccgcgtaaaggaacgaagagttcgaagtgtttccgaagctcttgaattcgatgtagagcgcgccttccgctccgtcttttccgatgccggtgaccttcggccattcggttaatccgtgttgcagggcgtactgcctgcgaatgccgatgtcgctggtgatttgcttgccgtcttcgtcgacgaactgatgccatgctccgttgtacgtttcttggatccaggcgagtatcccctcgtctacccgaaggccgtgcttcgagcagcgcacgacgatgtgcccttcgccatcatcgcttttgacggaatagcttccgtccgtcgggcaggcgatgccgttgttttccgccttgagatcggcgaggcatttttcgaatacggtgctcgaattcttgtcgtcgcccagcgtgtaggctgccagaaacgtggatttgagagatcggcggtttgcctcgcaggtcgcctcttcggcgtttccgagcgcgccggcgaacaggggaacggcgatggcgatgagcacgaggaggatcgcgaccacgatgaggagttcggccagggtgaatccggcggtatgctttttcatgcgacgcttgaacatggcttcctcgtttgaccgcgacaataggatggcggcactgtgctcgggtatggtgttcagcgcccgaagcgcaaagagaaccgcattcgaaatattactcaataagtcgtaattattcaatcggtgcacgcgcgatcaccgtatccgtacagatcgtcgagcattagattgcaggtttgtaagatcatcaaaggattcagcggttctttggtatcattgtttcgttaattaccaatcgcgcgagaaagaagccgatgagagaccttccgaaagatcatctgaatccgaaaatcaaaaacgtgtggcgtatcaacgatgcaatttggctcacggtggcgtttctttgccttttcgtgccgttccttatcgcgctcgtcgccgagcccgctccttggatcgggatcaccctggcggctatcgccgcgctctacgtgatcggtcttatcgtgtggcttgtcgtgttgccgccgatcaggttcatgcggtggcgctacgagctttccgaggactacctcgacatcgctcgcggcatcatctggcgcaagcgcttcatcattccgttcatccgcgtgcagaacaccgacacgcgccagggccccatccttcgcgctttcggcctgtcgagcgttaccgtatcgacggctgccggcgagcatgagatccccggcctcgaaacgcacgttgccgaacagctgcgcgatcgcgcagccgagcttgcccgtatcgcccaagaggacgtgtaggccatgaccgaagagcaacgtcaacccgaatccggcatgccgcccgtgccgcctggagcggcgcccgcccagcagccgtactcgcagcctaaccagcagccctatcagcagcctgcccccgggtactacccctcccagccgatgcccgcacagcccgtcggcggctacgtcgatcccgctgcggcgggatggcagcagcctgttcagaactcgacggaaccggtgaagcatcgcgtgcaccacagctatatctggctcggtagcctgcaggttgcgggcatgcttatcgtgatcgcgtttttctcggtgttctcgtcggtgatcggggcgatcgccgatggggaatccatcgggcgcggcgatgggcccgttttgctgatcgtcggcatcgccgtcatcgtcgggctcatcgtcatcgtcggcctgacggcgttgatccagacgctttcgtacaagcatctttactacgaaatcgggcccgatgagttcaatctgtactcgggcatcttcaacaagaagcgcgtgcacgtgccctatcagcgcatccagtcggtgaaccagaaggccacgctcgttcagcgccttgcgggagtctgcacggtcaacatcgacaccgcgggcggttcggccaacaaagccgtcgtcatcccttatctgcagaattccgaagccgagcgcttgcgcaccgaattgttcgcgcgcaagcaggccattctttcgggtcaggtgtaccaagacgccataccgggtcagccgggctcgcaggcgggctatgcgtatccggcgggccatcccgcagcgggcaacgtgctcgatatgcctgcagagatcctgaccgatgtgcgcggagtattcgggggcgccgccgtcgatacgggccgtgtttcatacgaatacggcatgagcaacaaagagctggtgctcacggggctttcgaacaacacaggtttcgcgctcatcattttggcggcgatcggatcggttgccggccttgccgagcagatcctttcgacggcgatcggccgcatgctcgtcgacaacggcatcgatttcgtcacgaggtcttttgcgggcaacaccatatgggccatcaccggcatcgtggtcgcggtgtttctcgtggtctgggtgttttctatcatcggggcgtgcatttcctacggcgggttcaaagcgcgcaggcgcgacagtcgcatcgaggtcgaacacggccttttgcagcatcgcttccacggcgtcgacatcgatcgcgttcagtcggtcatcgtcaagcagagcttcattcgccgcctgctcggttactgcgagctttcgctgggcaagatcgacgctgcagcggaaaacagcagcgaggatcagcagaaatccctcgcgccccaggggcttgtgatccaccccttcgtcaagatggatcgcgttcccgagatacttgcggggctcgtccccgaattcgccgacgtgcccaccgaatcgcggccggttgcaaaacccgccctcaggcgcgccattatccgtcgcggcattttgcagggcagcggattttggctggccgtcgttgtggccatgggccagatcgttgtgaacgcagtggtttcgccaaccaatcccgacgcggtgagtttgctgttcttcgtcaacaccggcgcgatcgtgctctacgttttgtgcgtgctgttgcttgtgctcgatgtcataggagcggtgctgtggtatcggggttcgggctttgcgtacaatcgccgtttcatgcagatatccaacggcggcttctcgcgcgaaagcgtgagttttccgcgtaagaaaatccagtacgggttcacgaaaaccaatccgttccaacgcaacgcccgagtggccacgatcaatgcgcgcacggcggcaggcatcggcggtacgacgttgcggttgatcgatgtgactgagcaggatgccgaaacgtggcttgattgggtcaaacccggcggaagtatggtacagtaagcaatcatgactgaacggctaaacaaggattcagaggacagtcgaagtaccgcttcgtgcagggcttccgtgccttcggctgagcctttgagcccctattcccaaccgggaacgtggacgccgtcccaattcaagccgaacgacatagcgggaatgcgcgccctggccgacggcccgacgaacacttacggcaacgcgaacaggaagaagcacaacgttcgcgaatacacgctcggcgaagaaatcgccaactcgatcacgcatggtctcggcatcgcgctggccattgcggcgattccgatcctcgtcgtcatcgccgtaggcaacggcggcggcatccggctgttcgctgcgcttgtatacacgatcacgatggtgctcgagtatacgatgtcgacgctgtaccacgccattgcggtcgaagaggcgaagcggattttcaagatactcgatcacagttgcatctatctgttcatcgcaggatcctatacgccgttctgtcttgtctcgctcgccgactcgggcggcgtctggctttgcgcgttcgtgtgggtcgtcgcccttgtgggcgtggcatgcgaggcgttttgggtgtttcggccgcgttggatatcggctgttctgtatctgctgctcggatggtgcgtcatatggttcctgccggcgctgatcgccgcgattccggctccgggcctctggcttctcgtcggaggcggcgtatgctattcgatcgggtgcatcttctacgtgctgaagaagatcccctacatgcactccatcttccatctgtgggttctggctggcagtatcctgcagttcttggccatcgcactgtacgtgctgtagttcaaaggagtgacactaaaacccatatggacattggcataagcattgtcgttaccttcatcctcgtgctggtaaacggttatttctccatgtcggaaatggcgcttgtcaacgcaaagcgcgtgctgctcgagaaggacgccgaagaaggcgacaagcgagccgagctcgcagcgggtctcgcagccgataccagccagttccttgccaccatccaggttgccatcacgctcgtcgggttcttcgcctcggccgctgcggcgacgaacctatccgatccgctggcccagtggctgagcggcttcggcatcgggtggctgtcgtttatcgccccgggtctgtctccggtgatcatcacgcttatcgtctcgtacctgagcatcgtggtgggcgagttggttcccaagcgcatggcgttggccgacgcagaaaaggtggccaagcgcgttgcgcgccccctgatggtgttccgcacgatcgccaagccgctcgtgtggcttacctccgcctccgccgacggactctcgaagctgctgcgcatcaagagcgccgatgagcgccaggatgtgtcggaagaggaaatcaagtacatggtcaccgacaacaaagagcttctcgacgatgagaagcgcatgatccacgagatcatcgagctcggcgacactacggtgcgcgaggtcatgcagccgcgcgtcgatatgattctcgtcgaggataccgagacggtgaagcaggccctcgaccgcatgcggggaaccggctactcgcgcctgccggtctaccatgaggattacgacagcattgtggggatcgcgcattacaaagacctcgtatctcctctgatggacggcaaggccgatgaagaggtgggcaagtacgcctacgaggccatgttcgtgcccgagaccaaggatatatacccgctcctctcggagatgcaaacaaatcggcaacagatggccatcgtagtggatgaatacgggggcaccgatggtttaattaccctcgaagacatcgttgaggaaatcgtgggtgaaatcatcgatgagtcggattcggaaagcgagtacgtaatcccggtttccgaaaacgagtggtcggtggatggacggttcccgacagacgaagccgaagagctcggatggcctgttaccgaatctgacgactacgagacgatagccggatggctgctcgatcggatcgatacggtgccccagattggcgaccggttcgatatcgacgggtattcgttcaggatacagtccatgcgccgaagacggatatcttccattcgggtgaaaaagatcgagagcgccgagatcgattcagggcatgatactccggatcatcggggcggaagggccgagtcgacggatacggccaaagaacggatcgagtagggggatgcttcgctttccgacgttgaggcggcgatgctcctgcgggccgcgagacgaggaaaggagaagccgtggcatccgagaagcgattgtaccgttcgcgcgacgcgctgatcggcggcgtgtgctccggcatagccgaatacttcgatatcgaccccgtcgtcacgcgtattctcgccgtcgtgctcacgcttgcttctgccggggcgctcgctatagcctacattgcgctctggatcattctgccgcttgcccccgatcctgctgtaccggttgaggtccagcccgaatcggtccattccgatacgtacggccctatcgatttcgatgcagcgaaaccgaagccgcatacgggaagcgatgaccgcaccgctgcgcatccgacggcgcaggccgcgccgtacggcccttatgcgaacgccggtgcttcgtatgcggggacgggccacgtgccgcctgagcctcccaagccctacgcggacgtagcgtcaccccatgtcgcccgggcgtcccgcgtgtctcaagctgcttacacggttccgatcccgccgaccgcccaggctgcctacgcgccgccggtaggcgctcccgtccaacccgccgagcccgtatcggggaaatcggttcgggcggctctgtggctcggattcctctgcctgttcatcgggtgtgcggccatcctgagccagttcatcgacggcgttgcatggtggcgcttctggccgcttttgcttgttatcgtcggcattggaaacgtcgtcattcccgctccccggggcaggcgaatggggcagttcgtcaacgggctcatgtccatcgcggcgggtgtggttctgctggccatgtcgctcgagatcatcgattggtcgagcatagtgcccatgctcgaagagctctggccgcttctcgtcatgatggtcgggttcttcatccttgcaagtgcgctgcacaatccactgtgcgaactgctcgccggcctttgcttcgtcggattctgcgttgttggccttgtctggttcgccgaaccggggtcgaccgatttcatcacgctggcgcttcctttcaaagaagcgctcactattgacgtgaacccctggcattgaggtggcgatgtcggtgaataaattttcccagtacccgaaatcggcgcaaatagccatcatcgtaggcgtcggatgcgtcttgttcggcgtttggaggctgttcggcgtggcgttcggctacggttggtggaatgccatccaacggggtctgggaacgctgttctcctatctgtggcccgtcgcgctcatctgcgcgggactctacgtggtctgggccgcaatgaccggaagactcaagggcgtttccaccgttgattggaagaagccgttcgggcgcagcgtgaccgataggcgcatcgcgggagtgtgcgggggagtggcgcagtttctcggcatcgatccggctatcgtgcgcgtgctcgtgctcatcttgttcgtcgtgtcgccggcgtttaccgtgctcgcctacatcgcggcggcgattttcataccggaactgtagggcggttggcaaaaagccgtttccgcgtgccgtgcgaagcgcggcggtcgaaggccgaatgggagccggccgccgaagttttaggcgattgcgtttcttagcggcgaaaattgcgcgcttcccttaaatataggttcttaagcaccataattcgttcgcattttccttatgcgggggaccctgcatttatagaacaaaccatggaggggcctccacatatcggctggaaaaagtggctgagaaggccgtaatggagtagaatacgacgagtcaaaacagcataaaggcttctggacagcaaactcccccttacaatttactacgctgtcaccgcttcggcggttgagttttgcgctgtaaaacgaaaggctattagggctttggcattgaaacgatataacaaaacgcggaggcgtaccgctgtgtttgccggttctgcggcatgcttggtggttaccctgtgcattacgattgggatcggcacgtcgttcgccggtgccggcggcgtgaacaccgcgggcttcggtctgggcgattcggtcgtatccgaggatgcttcgcaaaccgaggcattgggcgttgcgagcgatacgggcgtccgtgagagttcgcagctcgccaattccgctcagcgcgatatcaccaagggcatcgaggccatcgaggccaaggaagaagccgatcgcatcgccgccgaagaggccgctcgtgcggaagaagaggcccgcatcgcggctgccgccgaaaagcaggccgagcaagttgccaccaatcctcccgccatcgatctgagcgaagttgatttctcggttggcaaagaggcgtttatcgaagaatggactgcccgaatcgatgcgtatcttgcgggctcccccttggcgggacagggcgtgacgttcgctacggctgcatgggacaatggcgtcgatccgcgctggtctccggccatttccaacactgaaagctcgaagggcgccgtgtgcttccttccgtacaacgcatggggctggggcagctcttccttctcgagctgggaagaagcgatcaacacccacgtagccggcctggcgagcgtgtacggccataccatcacctattcggccgcgcagaaatactgcccgccgaactacgatcactggttctcgagcacgctttctgaaatgcagcgcatctagcaatcgccttacaaacgaaacaaacaagcccgcttttgcgggcttttgtatatcctatactggatgcatgttcgcggtgtgtgcagcgaagcgccgcggctgcaaacgtgcggcatcggatgtagtatgggtgccgtgcaatcgaaaggacggaaatgagcaatgttatcgtcgtcgggtgcggccgcgtcggctcgcagctcgcgaatatgctatccgacaacggaagcaacgtttgcgtgatcgaccgcaatcccgatgctttcgccaatctgggccgcaacttcaatggctcgatgctgcagggaatcggattcgatgaggaaacgcttgtcaaggctggcatcgaggaatgcgacgtcgtggcggccgttacgcagctcgacaacacgaacctcatggtggccgaggttgcggggcgcctgttcggcgtgccccatgttatcgcgcgcctgtacaaccccgaccatgagcgcgcctacatgcagcttggcatcgactacgtgtgcgggacgtcgcttgtggccgaagacgtgttctcgaaggttgttgcggggcacggaagccacctcgacacgttcggggaattcgaggtgctgcgcttctccttgaacctcaacgggctgggaaagaagaccattcgcgtatccgaaatggagcgggatcacgaagtgcgcatcatcgcgttcgagcgcggcgacggatcggcaagctcgattcccacgcgcgacagcatcctctaccatggcgatacgattctcgcatgcgtgcgccacgagcttatcgattcgttctcccagtacatccaggattagggcaggtgcaccatgtatattgtgattgtcggaggcggtaaggtgggcgagtacctcgccactgttttgctgcaaagcggaaacgacgttgcggttatcgacgagaacctgcaaaccgccgaccgtctttcggttacgctgcagggtcgctatctcgttatccacggcgatggatgcgattcgaagtaccaagaggatgcgggtatccggaaagccgatatcttcgttgcgaccaccggacaggacgacgataacctcgtctcgtgcgagattgcccagcgcgtgttcaacgtaccgcgctgcatagcccgcgtcaacagcccgaagaatctgcgaatcttccgcgaggtcgggatcgaatgcgtatcgtcgactacgctcatcgccaaccttatcgaagaggaagccctgctcggcagcgtgagcattgcctcgtcgctttcgcacggcaacgtcatgctctccgaaatagccgtgcctcgcatgaaatatcacagcaacgaggcgggcatcgccgtcgaggacatacccttgccgcagggcagcttgatcgctgcggtatcgacgcccgacgatgttgaggtcgcaacgccggggacgctgctctaccccggggacaaggcgattgtggtcgtcgacagcgatatggtcgacgaggtgcggatggtgttcaaaactttgtagtatcctgtaacggtcaggtaaacggaacgcttgaagggaaacacctagccatgattggtcgctatacgcgccccgaaatgggcgccatctggtcgatgcacaacaagttctccatttggaaagagatcgaggtgctggcatgcgaggcccaggccgaactcggcaagtccggcatcacgaaggaagaggccgcgtggattcgcgcgcacgccgatttcacggtcgagcgcatcgatgagatagagaaggtgacgaaccacgacgttatcgccttcacgacgaacatggccgaatacatcgatgccgacgtgcccgagggtaaagagcctccgagccgatgggtgcactacggcatgacgtcgtcggatcttggcgatacggcgctttcctaccagatcacccaggcgatcgacatcatcatcgccgatgtgaagcggctcggtgaaacttgcaagcgccgtgcattcgaattccagaatgtgctatgcgtgggtcgcacgcacggcattcacgccgagccgatgaccttcggcatgaagttcggcagctgggcgtgggcgctgaagcgcgcgcaaacgcgcatggaggaagcccgtgcggttgctgcgaccggcgctatctccggtgcagtgggaacctattcgagcatcgacccgttcgtcgagcagtacgtgtgcgaaaagctcgggctcgcccccgatccgctttcgacccaggtgcttgcgcgtgatcgccacgcccaggtcatgaccgcccttgcggtgacggcttccacgctcgaatccattgcgatgcaggtgcgccttctccagcagtccgatgtgatcgaggccgaggagccgtttgcgaagggacagaagggctcgtctgccatgcctcacaagcgcaaccccatcaccgccgagcgcgtgtgcgggcttgcacgtgtggtcaagagcaatgcgcaggtagctcttgacgatgtcgctttgtggtacgagcgcgacatttcgcattcgggtgcagagcgcgtcgcgctcgccgatagcttcatcgccctcgactacatgttcgggaagatgcagtggatgctcgacggcctgcaaacgtatcccgcgaagatggagcacaacctcaatcgcacacgcggcctcatcttctcgtcgaaggtgcttttggcccttgtcgatacggggatatcccgtgaagacgcttacgtgatcgtgcagcgcaacgccatgaaggtgtgggaagatatccagaatgccgtggacggccccacttaccgagagcggcttgagtccgatcccgaagcgaacctttcgaaagaagtgctcgacgagattttcgatccatgggattttctcacgcgcaaggatgttgtgttcgaccggctgcaagagctggagttttagcaacacgcaataattacgcgaacggatgtttcacgtgaaacatccgttcgttttttgtgcagcgggtgcgattggaagcgagattcggcttctgtatgccgggctcgctaatttgtgcacgccatcggcttttggctggcgatttcttcgatggttgtgctggcgaggtatttttcgaactccgattggatggtttggtaggttccctggatgagcttagccgcttcttggttcggcacgttgtcgaagttgtcgttatcgggcaggttgggttcgtctcccatggcgcgcgcaagatcgtacaggcttatgttgctgggacttttcatgagggaatagccgccgtacttcccgctttgcgcttcgaggatggaggcctgcctgaggcgaatcgcaatctggacaagcaaatcgcgggggatgtgcatcgcttccgaaatttcgcgtgaggagcactgttcgtttctgagcgcaaggtagagcactgcccttatcgcataatccgtcgtcgcttttatccgcatcgccttgctcccttctgcgcgaggatgtagccgctgcgcattccgatcgggtgatgactcgtcacgagagcacgcgagcgggtagcgcccagctgtcgaagcctcttgttgtctaagttgtccggtggatgcgcctgctttcgagatggccgaaaggtgcgacatcatcataatcttattgtatacgtaaccaataagcacatgtcaataattatttacagcaatgcatatataagcaaaaaaataatctaactgcgccgtcccgtgcatccgcaggcgatggaatggcggctgctcgcagaccggtgcgatgcgagcgggataaaccagatgagcatccgattggcgtgcgcccgcgtttgggcaaacgcttaagggcgggactcaggcgcgttttgccgcccttacgagaagcatcatggggcggcgaagctcgtccttcatttcgggtacggcgtcgagcatctcatcggtcggttcgggctcgacgatggcttcgagggagaatcccgcgtcgatgaggctttgcaggtacgtggtaagggtcttgtggtgcttcgcgacctgctcgccgagaaacacggcatcgcgccagccttcggaaaagtagcgatcgacgggccagtgcagcttggcgccgtcatcgccgtaaaaccaatcctgcgttccgtatgcggtgaacacggggtgttcgacggagaaggcgaacgtgccttcgggggcgagccaatcgtacacggagctgcatacggctgcgaaggattcgacgtagtgaagggcgagcgagctgatgacggcatcgaagctttccgcatcgaacgaaagatcttcgattgcggcccttttgtagaccacgttggggcaatcggtcatctcgcgtgccttctcgagcattttttccgagatgtcggttcccagaaccgtcttcgctccctgctcggcggcgtagatgcagtgccatccgaacccgcatcccatatcgagtacgcgtttgcctgcaaaatcgggcaggagctttctgaactcatgccactcgcctgcagccgtcaagcccccgaccgagcggggaaacgcgcagtacttttcgaagaacgcttcgtcgtcgtacttgttctctttcataaggcctccttatgcggtgcggggtgccggcgggaatcgggcgaaaccaattgcagcgggctttggctacgcaagggcgataggggcccaaacgcgcacgcggcacagtttcttcttcgtgccgtcgaccgcggtgtcattgatgttcgtgtaggtgacgaacgtcgatgtcgaaccggtggtggcaaggtaatcgccgtagtcgtcgtggccgctttcgagcggcagggcgaaatacgtaagcgatcctatatcgacgccgcagacggagtaagtcgatttcacgatgaaccagccgttgctccaggaaggcgcggcggtgggcgtgcgggtgaaccgataccaggaaagtccctcgtagtcttcggttccgtgggattgcgccggcgtgtacgtgccgaggttcgctatgcctccgccgtagttgtagatggcgtcgaacatgaaggtgaacccgttgtcgccgtagcctgcttcgagcggcttcatcgaagttggaagcacgagcttgtcgcgcacctcgcatgaatcggcatcgagcaaagtgagctgatggttgaccgatgacgtattggtgcggggtgtgatgacgataccgtccagagatgcatagggcggcgtgctcatgcgcccggtcgaggaatataccacttcggccgtggagccggagccgaatcgcgcgcgtttgagcagggagtcctcggcggtttttttgccgccgagcgcgggaagcacctgccaaaacgcgttcatgccgaccgcggcgagagtaggggtctcccaacccgaatcgccttcgtcgacaagcattggcgagccgagcacgccgtcgttgagcgatgcggtgtagatgcgccagatgccgtcgagaatgttcgcttcagtccagatgagcccttgctcgcttgctcgaacatcgtagatatcaaagccttcggattgaccgaccgcctcttcgagaaccgttgcgagctctccgcttcccagatagagcaaggcgatgtaggcgagcggctttgccgtttcttcggtgggaagaaggcaagcggcaatcgaatcgttgttgttccacagaagggcgccgtagggaagatcgaagctgcccaccaagctgacgtagttggcgagatcgtcttcggcgatggccgcctggtcgtcgccgaggaccgaaacggcattttcgggcacctcgagaaccgaaatgctctcttcgtcggcactgggctgggccgcgctgtaaagcgcgaagcctcctccggcaaggacagcagcggctccgacgccaaccgctccgtaaaggaaatgacggcgagtgatcagcgtttggccgtgcgaggattgcgggggcgttgccttcggcattctagtcggctgcttcggcttgctcctcgcatacgcccgcttcgcattcatctgcttggcgtgcgcgcgcttcgcatgtgtgggtctgcgttcaggcacggttcgactttcctatacaacggggcctcggtgaattacgcgcaggtcgtgcgcttgaactcggcaaatgcccccgtacaacgtttgcgttactttgcacgtttattgtgtcatttaccatacggcttagaggcgaaaacgcatcaattgctacaataaacgcaaacacggtcccgcctacgtacttcgtgcggattaccagcggaaatgactgaaccgatgagcttgaggagatatccatgagcaacgaaacgcgacgtattttattggtcgaggacgagaaggctatccgcgatgcggtgacggcttacctcgagcgtgagaactactgggtcacagctgtcggagacggccaagaggccttggaagagttttcgaagcaccatttcgatctggtcatccttgacctgatgcttccccgtgtcccgggcgagcgcgtatgtcgcgccatccgcgacaactccgatgtgccgatcatcatgctgaccgccaagggcgaggtcgaagatcgcatcatcggccttgagctcggcgccgacgactaccttgtcaagccgttcagcccccgcgaacttgttgcgcgctcccgcgcgctgctgcgccgcgtgcatgccgattccgaacctcagcgcgaagtgctcgagttcggcgagttgacgatcgacgtgtcgggccacaaagtgcttgtcaacggcgaagaaatcgatctgaccgccagcgagttcaaattgctcactacgctgtcccgctatccgggtcgcgtgtattcgcgcatggagcttgtggaaaaggtgctcggctacgatttcgagggctacgagcgcacgatcgactcgcatgtgaagaacctgcgcgccaagatcggcgacaacccgcgcaaccccaagtggctgcatacggtgcacggcgtgggctaccgcttcgaagatcccactaaagccggccagtaagcacgtactcggtggtcaaaagagataatatagccgccgatcctgacggcggcgcgacccgcccccgcttttggtcgaacctgacgtacacgacccgcctgacggtgtcgttcgccgcgatcgccgccatgacggcgctcgtggcgattggcgtgctctcgttcgtgtgggagcagcatttccaggcttacaccgaagccaatctgaagaacaccgcgagcagcatcgcaagcggggtcgccaggcagtacgccgagcacggcggttactacgatcccgatgggagcgtgaacagcgaggtaacctcgtcggctcgatacgtgtacgagaattcgaagggcgtcggtatcgtcgtgtacgatacggtcaaccatcaaacgatatgggatagcacgcttatagatacctcaagcgacgagggcggcaattccgatggacaagcgcaggtgcccaccggcgtcgattccgacgcccagtcaggcgatgtccccgcagacgatcaggctgccggaggtactccgggcgatgcgaccgacgctgcttccggcgagcaggcctccggtcaagcagaccaaggcgccgatgcgaagacgaatatactgaagcaatcgctcaaaccgtccgacaactacgtcgaagtaccgatcaaagtcgacaacgaaaagatcggatcggtatcggtgtgggtgtacggttcgaacaccctgctgcttccccaagatgtcgagttccgcgaaaaatcgtatcaggcgatgttcttcgccgcagctatcgcgatcatccttgctctgtgcatcggttttctgttcgcgcgcaatctggtgcggccgatcaaccgcatgacgaaaacggcgaaggctatcaaagagggggatatgtcggcccgcaccgaaatgcacggcgacgatgagatatcccgccttggcgaaacgttcgacgagatggccgagtcggtcgagaaagaccgcgagctcgagcgccgcctcacgaccgacgttgcccacgaactgcgcacgccgctcatggccatccaatcgacggtcgaggcaatggtcgacggcgtgttcgaagccgataccgaacgccttgaaacggtgaattcggaagtgcagcgcttgagccgcctcgtggatgccctgctgaagctttcgcggctcgaaaaccgttcgacgcccatgaaagaggaggtcgtcgacgtgggatcgcttatagcgggcatcgtctccacgcatgacgctttcgtcaacgattcgggcctttcgatggaattccatgctcagccgggtgtgtacgtatacggcgacgcggatatgatcaggcaggcaaccgccaacctcatatccaatgccgtgcgctatacccccgaaggcggacacattacggttaacgtcaaaaaaggcgatatcatggcctcgattgcggtcaaggacaccggcatcggcctttcgcccgaagaggcgaagatggtgttctcgcggttctggcgcgccgatgcgggccgcaaccgcgaaagcggcggcctcggagtggggcttgcggttgtgaaggaaatcgtggatcgtcacggcggttgggtgcacgtcgagggtaagcccaacgagggggcaacgttcacgatctacattccgctctatgatgaaaacagggtgaaaaaccgagccaaaaacaaagaaaagtcgaagtcgcgcccgaagaagtaacccatcatgctatcgtgtccaattatggtggattgcaaacgcatacccggtatcaaacggagcctttaggaaggaagatcaagcgacatgtccggaatcgacatcaagcccgatgcgcagggaaaagtgcgcgacctgtacgatctcggcgacaagctgctgctcgtcgcgtcggatcgaatctcggcgttcgattacattctcgaggatgagattccctacaaagggcaggtgctcacgcagctttcgtgcttctggttcgagctgcttgacggcgtgatcgaaaaccatctgatttccgctgacgtcaaagatctgcccgagcagttcaagccctatgaagactatctgcgtgggcggttcatgctggtgaagaaggccgatatgttcccggtggaatgcatcgtgcgcggttatcttgcgggcagcggcctgaaggagtacgagcgcgagggcacggtgtgcggcatagagcttccgcagggccttgtgaattcttccaagctcgaaacccctgtcttcacgccttcgaccaaggccgagatcggcgatcacgacgagaacatcagcttcgagcgcacggccgagctcatcggcgacgaggcggctgcggcgctgcgcgacctgtcgatcaaggtgtattccacggctcgcgaccatgcggccgcccagggaatcatcatcgccgatacgaagttcgagttcgggcgcgtagacggcaagatcatcctcggcgacgaggtactcacccccgattcgtcgcgtttctgggccgttgatacctacgcggaaggccaagagcagccgagcttcgataagcagttcgtccgcaattggctcaacgacaactgggatcgcacgggcaatccgccccgccttccgcaggatgtcatcgagaagacgagcgagaagtacatccaggcgtacgagcgcattaccgggcgtacgttcgagaagtagataccgccacgatgccgttcggtgcgctgagcgcacgggcggcggatgcgagcaagagcacaacgagggagttttactgcaatgagtcaaagaaacccgatgaacgaccgctacacgactgacgaccgtaagggccagacgcgtaagagcgcggcgaagatgaagccgaagaccaaagccgcttcgacggtgcacgttcagagcacgacgaagacgaagcagcagaaaaaggccgagcagaaagccgctcgccagaagcagtcgcaggttgatcgcaagtactacaatcctccgacgcaggaatacaagaagcttcgtcgcctgtggtggattctgctggttgccgccatcgccatgacggcgttctcgtggttcgcccgttcgctgttcccgaacaacgagatggtgagcttcgtcgccctcggaatggcatacgtgctgatcatcgccgcactgtacgtggacttctcgaagatccgaaaggttcgtcgcgcctatcaggaagagatggagtccaagaagaccaaagaggtccgcgccgccgaaaagcaggcgaaggctgcagctcaggcgaaggctgaaaagtccaaggacgaaacgcccgccgtcgaagctccgaagaagcgcagcttgttcggcagcgggtttcggttgtcgaaggcggaatccgctaaagcggagaagaaggccgagaaggctcccgccaagacgtcgggcgatgcggcgaatgccgattcgaccgagggcaacagcatcatcggcaaaatcaagaagggcagcgaagctaaggattcggcgaaatagcagaccgccctggcagaaacgcgttcgggcgaaagggtcagcggagcagccatccgagcaggccgaacctggacgtgcattcacatcggtatgcatgacgaggaaggtaggagctcattcatggtttctcgtgtctacgtggagaagaaacccggtttcgacgttgaggcccagcaactctgttcggaactgcacagcattctgggcatcgagggacttgcgggtcttcggctggtaaaccgctacgacgtcgaaggcatttcagacgagctgttcgcccagtgcgtccccaccgtgttcagcgagcctcagtcggatatcgctgcgaccgagatgcccgatgcggatggagcggtcgtcttcgcggtcgagtaccttcccgggcagttcgaccagcgtgccgattcggcaagcgaatgcattcaactcatcagccagggcgagcgtcccgaggtgcgcagcgccaaggtgtacatgcttgcaggcgatttgaccgaggcggacgtagaggccatcaagcgctacgtcatcaaccctatcgaggcgcgcgaggcatcgcttgagatgcgcgagacgctgcatatggctcagccggttcctgcgatggtcgagacggtggatggcttcctcgggcttgacgaagcgggcctcgcctctttcatcgccgagcgcggccttgcgatggaccttgccgatatagtgttctgccagcagtatttcgccgaagagggccgaaaccccacgatcaccgaaatcaagatgatcgatacttactggtcggatcattgccgccacacgacgttcggcaccgagctcaacgtgcacaccatcgacgacgaagcggtgcgggcggcgttcgagaagtatcttgccatgcgccacgagctcggtcgcgacgagaagcccatctgccttatggatatgggcactatcggcgcgcgttacctcaaggcgaagggcattctcaccgatttggacgaatcggaagagatcaatgcatgtacggtgaagatcacgtgcgatgtggatggcgaagagcaggagtggctctatctgttcaagaacgaaacgcacaatcatcccaccgaaatcgagccgttcggcggtgcggccacgtgcgtgggcggagccattcgcgatccgctttcgggccgcagctacgtttaccaggccatgcgcgtaaccggcgcggccgatccgctcgtgcccgtgtcagaaacgcttcccggcaagctgccgcagcgcaagctcgtgaccacggctgcggcggggtattcttcttacggcaaccagatcggcctcgcaacgggtcaggtgaacgaactgtaccatccgggctacgcagccaagcgcatggagatcggtgcggtggtgggggcgacgccggctgaccatgtgcgtcgcgagacgccggcacccggcgatgtgatcgtgcttctgggcggtcgcacgggccgcgacggcatcgggggagcgacgggctcttccaaggcgcatacgctgggaagccttgagagctgcggtgccgaagtgcagaagggaaacgcgcctgtcgagcgcaagatccagcgtttgttccgtcgcggcgatgcctgccgtttgatcaagcgctgcaacgacttcggggcgggcggcgtatcggttgcggtcggcgagctggccgacggtctgagcatcgacttgaaccaggttcccaagaagtacgacggcctcgacggcaccgagctcgccatttccgagagccaggagcgcatggccgtggcgcttgccgccgaagatgcggatgcgtttatcgcacttgctcacgaggagaatctcgaggcgactccgatcgctacggtgacagaggaagcgcgcgttcggatgaattggaacggcgaaaccatcgtggatgtgagccgcgatttccttgcctccaacggtgcgcccaagcatcaggacgtgcatattgcgcaaggcggcgcttatgagcgcgcatgggagggcgatacgctttccgagcgcatgcattcgcttgtgaccgatttgaacgtggcatcgaacaagggcctttccgagcggttcgattccaccatcggggctgctacggtgctcatgccgttcggcggcaagcaccagctgacgccgaacatggcgatggtcgccaagcttcccgtcgacggcgaaacgaccacgtgcagcggcatggcgtggggcttcaacccgtatatcagcgaggcgaatcagtttacgggcgcgtatctggcggtggtcgagagcgttgcgaagctggtggccgctggattcaagcatgaagacgcctatctgactttgcaggagtacttcgagcgcttgcgcgatgaggacaagcggtggggcaagcccgcagcggccgtgctcggtgcgcttatggctcaggtcgatctgggcatcggtgccatcggcggcaaggattccatgtcaggcagcttcgagagccttgatgtgccccccacgctcgtgagcttcgcaacggcagtgggctcggtcgatcgcgtgacttcggccgagttcaagcgggcaggtgcgcgggtgatcgcagtcaagccgcgctatgccaacctcattcccgaagcggaaagcatgtgcgaaacgctgacgctggtggaaaagctgatcggcgaaggtggtgcggcggccgtttcgacgctcgggtacgggtgcgctgcggaagcgttgttcaagatgtgcgttggcaacggcatcggcattgcggttgacgagggcgtgaaggccgaaagcctcttctgccccgcttacgggacgttcgtcgtcgagcttgccgagggtgccgaggcgcctgcatcgaccgagcttacgaccatcgtggcgatgggcgaaacgagcgccgactacgcgttttcggcggcgggcgagacgatcgacctggccgaattgcaggaagcgtgggaaggcaagatggagcccgtattcccgtatcgcggttcgggcgaggcagtcgagacggtgagctgcgtcgatgcggttcctcttacgtacaacggcgcgatcgcgaagccgcgcgtcatcatccccgtgttccccggcaccaactgcgaatacgatactgtgcgcgcgttcgagcgcgcgggggcggtggccgatgttctcgtggtgaacaacctcacacccgaccgcgttgcagaaagcaccgaagcgctggtgaaggctatcaagaacagccagatcatcatgctgcccgggggcttttcgggcggcgacgagcccgatggttccgcgaagttcatcaccgcgttcttccgcgcacctgcggtgactgaggcggtgcgcgatctgttgcagaatcgcgacggtctcatgctcggcatttgcaacgggttccaggcgctcgtaaagctgggcctggtgcccttcggcgacatccgcccgatggacgaaacctgcccgacgctcacgtacaactcgatcgggcggcaccagagccgcctcgtgcgcacgcgggtcgcatcgagcctgtcgccgtggctttcgcgctgcaaggtgggcgatgtgcacaccgttgccatcagtcacggcgaaggccgtttcgttgcatcgcccgagcttgtcaagcagatgaaggcggcggggcagatagccacgcagtacgtcgatgcagatggcgtgccgtcgatggacctttcggtgaaccccaacgggtcgatgctcgcgatcgagggcatcacgagtcccgatggccgcatcttcggcaagatgggacacaccgagcgcagcggcaacggactgtacaagaacgttcccggcgatctgtaccagccgcttttcgaaggcggcgtcggctacttcaccgactaaaggcggaaggcggaatcttgcattccggattgtgaaacgaggggctcgcatggcgggcccctttgctcgccatgaaacgcgaacaaatgtttcacgtgaaacatttggcgttgtttcgcggatatgcgagttttcgagcaggcgttcttgctgcggtcgcatatgtgttttagtgtattctccttcgcgtgaattgctgcatggaatcggttgacgaaagaggggtgggcgtgaaatgaggttggcggcgtcagtccttttttgcgaaagggccacccgtgcttgataggctgatttcgtttttccgctccgaggcggtgctgtgcatcgccgctgtatgcgcgcttgcttcggcggcgttcgttccgcctgatgccgaatatgcatcctacattgatacgcgagtgctcataatgctcttctgcctgatggcggctgttgcaggattgaaacgcgccggcttgttcgcggcgcttgcgcagaagctccttgagggtaagcggcctatgcgcgtcgtcatgcttacgctcgtcatgctcccgtttttcgtttcgatgctcgttaccaacgacgtcgctctgatcgcgttcgtgccgtttgcggttctcgtgctgacccatgccggacaagagcggcatctcgcgtgggtgatcgtgctccagacgatcgcggcgaatctcggcggcatggtaacgccgatcggcaatccgcaaaacctgtttctctatacgtacttttcgatttcgctgggcgattttctgcgggcgctgcttccgttcgcggcgctttcgctggttgtcctgggtgcggcatcggctgtctggggcaggggagcggcagatgttgcccttccgcttaagcgatcgggcatcgatcgccgacgcgcgggcgtgcacggggcgctgttcgcgctctcaattttggcggtgcttcgcgtgatcgagccgctcgcgttgcttgcggtagtcgtgtgcgcgctcgtcctgatcgaccgaccgatattcaagcaggttgattacgggctcttgctgacgttcgtttgcttcttcgtgtttgccggcaacatggggcgcatcgaagcggtgcgcgatctgctcgagtcgctcatgggatcccatccgctgctgacgtcggttgcggcgagtcaggctatcagcaacgtgcccgctgccgttctgctgtcggggtttacggaaaactggcagagcctgctcatcggcgtggatcttggaggtttgggcacgcccatcgcttcgcttgcaagtctcatttcgctgcgcatttaccttcacgtcgatggtgcgcgcatcggaagatttgcgctcgtattcggggtagccaacgccgttatgcttgcgatgctgctggggttgtacgcgctgctgtatgtggtgtagcgatgcggggttggatgccgaattggccggggcgttcctgtcgttttgatcggcccgaaagggaatcgaggccggggttagcggaggattccaagctgcgggcagcatatcgatgccgtgctgcccgcagactcatgcattgcgtgcgtaaggaagctagtcctcgaatccgactgcgtacccgtcgatcgtcgttcccttcgcgagagcctgtccgacaaggcgcccgtaggtcatgccgcgtccgtggcttgtgcccggcagcgtgaccgggtaggagttggcgaagaaatcgccctgcacgttgccgatggcgaaaagcccgccgatgggggcgtcttcctcatcgagcacctgcgagttctgatcgacgcggaggccgtagggcagggcgagcagccatgccgaaacgttgctcgcatagaacgggccgtccttcaccgagctgaggaagcgctcgggtacgccgaagtcgatgtcctcgccggtttcgcagaacgaattgtagcgatcgacggttttttgcagcgcatcgtaaggtacgccgatggcgtcggcaagctcctgcagcgtctcgcccttgaagaacgctccatccgcaaccgcctgttcgactttttcttccaggccgtcgatgaacgatgccgacttgataggctcctgcttctgggcgtgctcgacgaaatgggaatcccagatcgcccatgcgacgcttccgggcgtattcatgcgggcattggtgacgatgggttcgaatccgacttcgcagcagtagcgcatgccgtcgcggttgaccgtgagccagcaggtatcgaagcccggtcccatgaccgcaaggttgacgggatggatgatgggtgccggatagcagggcgaaagggccgcgccgatccatttgcccatcgtaatgccatcgcccatgttgccgccgacggggaagtagtcggatttgtcggcgcgcagcgccatcgggcagaagcattccttcatctcgtcgttgtcggtgatgcctcccgttgcgagaatgacgcccttcgtcgcattgatcttcttatacccatcggcattgctcaccacgacggcggttaccgtcccgttttccttgatgagctgctcggctgtggtctcgaattcgaaaacggcgccgtttgcctgcgcgttgtcggcaaccatgctgatgaagtatccgacgttccagggctgctcgggaagcgagcttccttcgggaagcatgaacttgtgggcggtacggaactgcttgaagcgatcgtcgagcgtatcccagtcggaacgggccgtcatctcgctgttgaggatgacttcgtatccgagctcgttcgccatgtcgatgtagtaatccatgatttcgccgctgcgttcgacgaactgcttgatgaggaagtagttcgcttcggattggccccattggtagatcaggcgtgtggcaagtgctttgtcgatgtcgacgccttcctccttttgaagggaagagccgacggccccgatgtcggtgccatgagccgtgatgccttcgaacttttcgactacaagcacactcgctcccgcttcggcagcggcttgcgcggcggtgcagccggcgatgcctgcgccgatcaccacaacatcgtaggtttcttcagatgagatgtcgggcagggcgggtgcgggttggagccacgcgtgggcgccggtcgattccgctgcccccgagccgccgcttgacccggtgccggatggggcgctttcggcgggcgagcatcccgcgaggccgaccatggcggccgaggctcctgccaatgccgcgccggttataaacgagcgacgggaaagtgttttctcttccatgttttcctcctatgttctctccctcggaagcgattgcctccgctgtttcgaagcataggagcacggtgcgattgcagtaagcgcccgaggggggtgaaatgcgataagttcggtgtaacccctcgtgggctacatgcttgcaagagaaacctctatcgggttgccgtgagccgagtcgaaggtgcgatgcgtgggggtcggacggcggctacatgccccgacgttcgcgttcgattctggcttcaacgagcgcggtcgcttccttcttggaatggatgtcgagtttggcgtagatgcgccgtgtgtgcgatttcaccgtgtcgttcgaaatgctgaacgcttcgcggatgtcggcacggtctttgccgacggcaagcaagtagaagatctccgtctcgcggggcgagaggccgccctccgaagcgaccaggtcgctgcatgctctgaattcttgttcgaggtttgcgttctgatcggcttgattcgttttgcggcttttgccgaacaggaatgcgaacgcgacgacgaacaggtacacgaccacgagtgagacgatggatatcgcctgcgatgcttccgaacccaaaagggccatggcatcgcttgcgatcgatccgataagcgagcttccgagaaacgacagcaggccaatggcgacgatgacgtacggcttcttggtcgaggctcgtgcctggtcgacgcagaagacccacagaagaaaatagaaatagctatgtccgatggtgaaaacgacgatggggagcggcagatcgccgaggaattgcggaaggagcaggaatcccagggtaagaagcggaaacgatatttggcagacgaggtagagttcgcttcctttcttgaagaacaccgttgtgattacaaggagcactcccgccagtgcgatgccgacgacggtggcaacggtgactatttcaaccgagcttgcagtgaacgagaggctgacgcctcgcatgatgccgtagaccagaccaacgagtacagcgaggctgatcaggctcgatccttttggcgaagatgcattgtcgggcttgcggtgctcgtcgatgctcgggacgtaagccgtttgagcgtgtttgagcagaagccctgcgccaagcggcataacgaccgcggcaatttgggccagcagaatgggcagggccatgacgatgctgaaaaataccgcggtcataaacgaatagatagccatgtcgaataagacgcgacgaggctcaagatgcgagaggtgatcgccccatacgagaaacgccaacccgcttccgatgcccgtgaacacggctccgcagaaggcgaagggtagcggatcggttgcttcggaggagtaggcgagacaggccgtgccggcggccataagcagatggcatgtccacagcgttgccgactgcgctatcggaagcgagcttctcttcaaggcgagcgcaatcgcgaacgtgacgattgtgatcagaagggagattgtccaaacctgatgctgcgagggaaaggggagctgcagcatcgaggcaggggcgagcgcgggcgcggcgaatacaacctgaagccatgcccaaaacagtcccatgcccagaaggcgggcaggatgacggcgcgtttcgtcggctgctatttcgatgaagccttttacgtcgcccgaagccatggttacttccccttcccgccgagcatgaccgtcacgtcgcgaccgaagcggcgaagaacgatttccgagagccgcttgatggcttcagtaaggatcgtgcgggcgggttcgccggtgttcttgttcgcatccatgagaagctgcacggttttcgcgccgccgctcaggatatcggtggcgttttccgcgcccgatgcggcgatggcctcgaacatcgcatcgacgatgacggcgagctcttcatcggaaaacgatccgagccattcggttatcacctgatcagtgaagcgggcgctgtcggagatgctgtcgacgaacgcgaatcgatcgccgtttagctgccaggtgaatccgctatgggcgttgatccccttcgcgtcgcttgcgacgacgcggtagttctcatgcgattccatgagcatgcccacgatcgaatcgacgggaacgatcttgacgatgcggtctttcagcttcgcgtattcctcgccggtgaaaaccgatggcttgaatcccggtccgtcgaaatcgtacacgcgctctatgcgggcctgcactttcggatcggcgttgatggcggcgtagacggcgaggttgccccctttcgagtggcctccgagcatcaggcgcttcggcaggccccccgatgccgattcaacgtagcggacagcctggtcttgtgcaggaaccgggcaggtgaacgccatgttgaaatcttccttccaaccggtaaacgagctgtcggtgccgcgaaaaccaaggaatgcgaattcctttttgtgcacgaacgccattgcggcgaactgcgtttggcgttcggtgtcgaagaggctcaggtagtcgcgaatgacgatatcgcggaaacgagggctggcggcaagagcgataagcagatccttcgttcgcttcggcacgaggccgatgaacatgcggtcgaaaaattcggctcgcagcgcatcgcggaacgtcacgccccggccgctcggcgagaacaggttttccacaatcgtgcctatatcggcgaacaggctcttctctttgaggctcggcgcgatgtcatcgaagcgggccatgcagatttccgagagaacgagcgcgtccacttcgccgaatggtttctcgtcgaaggtggcgaattcggtttccagatagtcgagtatgttcatagacgctttccgatccttgagcttcatgacgatgccgaatgtgcagatgcggtattgtgccgatgctgtgcgcttgcgttcgcgcgcgggttccctaatacattatcgatgcagtgcctatgatgacacaagcggtgaaaaaggtcttgggacttgctttcgataggtgctttcaggtgtaaagggcggtgggtcgccgtatggcaccgcgtcggagacagcgcggttgcgctttccgcgccccgatgccccctgtggcggcgcgaccttctgcatcagcatcccgtcaagtcgggaaggctttgtttgccagcaactttactgcgccatgaacaatccgtgatccagggtttgcccaagattgaccaaagcttgacatgcgcctgacggggatcggacagagcttgcttagcatgggttttgcggcggttgttccaaaggcgatgattctgcgttgctcttcccacaggttgatcccctgcctttcgggtcccgctactgacaaaacaacaccaagctattgagagaaagagagccatatgtttgaaggcacgatatcccgacgccggttcgtcatcggcggcgcttctgttttagcagcaggtgcattggctttgatgacgggttgctcggctggcggtacggcgacgggcgcggccggcacggccggcgctgcaacggcggacactgctcagggcgcaacggcttccgaaaagatcaccatggtgtggctccccgacaactcctcggccgacctgacggcatcccgcgaagccatcggcaatgcgatcaccgcggcatgcggacgcgaaaccgaactcatgaccaccaccgactacaacgtggccatcgaggcgatcgcgtcgggcagtgcgcagatggcgctcctgggcgccgagggatacgtgcaggcgaacaagaaaaaccccaaggtgcttgcggcgttcaccaacagcgacgaggatggaaagctcgatggcgcctgctattacagccgcatctgcgtggctgtcgaaaacgccgatcagtacaaagagggtaacggctactctatcgagaacatcaagggcaagtcgttctcgttcgtctccgccacctcgacctcgggattcaaagtgccttcaagcgccattgtcagcgaattcgggctcgattcttcggatcagctgctcgaggcgggatccttcttctccgaagtcctgttcggcaattcccatgcgggatcggcggtcaacctgctttcgggcgatgcggatgcggcggcgttcgatgacgtcgatgtcgatatgtatctcgatctcgtatcgggcgaagcgaacacgatcggcgccgtctacaaggcgaaagacgatgccgaagctccgtttgataccgtgcgcggcaaaaagttcaccatcatcgcgatcacgccggttctcaatgcgcccgtgtgcttcaacgaggatgcgatcgacgaggaaacccgctccaagatcgtcgagtacttctgttcggacgaagttgccgacaacaaggcgatcttcatcgatccggaggacgaaagcgctcagggaatctttgagaaagaatctgaaaaaagctgctttgtcaaagtgaccgacgattggtacgaacccatccgcaagctcggcgcttagaaggcgattgactgatggagcggcagacattgctcaacatagaatcggtgtcaaaggcgtataccggaaaggcgaaggccctcgacggcgtttcgttttcggtcgagcgcgggcaattcgtttcggtcatcggatcgtcgggggcgggaaaatcgacgcttttgcggtgcatcaaccgattgatcgatccgagcagcggagccgtcgagtttgatggcagggacgtgacgaagctgggcaagcgcgaattgcggcagattcgccgtcgcgtcagcatggttttccaacactacaaccttgtgtcgcgctcgacggcgatcgaaaacgtgctgcagggaaggctcggttacaaatcgagcctggcgggagttctcgcgctctactccgaggaagagaaaacccgtgcgttcgacgtcctcgatcagctcggtcttctcgaatttgcgtatcgtcgctgcgatcagctttcaggcggacagaagcagcgggtcggcattgcgcgggcgctcgtgcaagatccgctgctcattctcgccgacgagccgattgcgagcctcgatccaaaatcgtcgcgtgccatcatggagcatctgcgatgggcggctgacgatctgggcatcgcctgtttggtgaacctccatcaggtcgattacgccatcgagttctccgatcgcatcatcggtctcaaggatgggaagctcgtcttcgacggaactcctgccgagctcgatgcagaagcgattgcccgcatatacggaacgccgtacgtgaaggagcgctccgtgaagccgcaagggttctcagacgcggtcgaagccgatgtcatggcagcggcgggtgttgcgtgatgactgcggcggaaccgcgtatcaaggcgggggaggcgcttgcctgccaaggcgtcggcgcaatcccctcgggcggcgcatccgcgtcgtcggctgggaaagttgaaacgagcttctttcgtcgccgcagcctttcgatcgtcggggtgttccttgcgttcttggctgcgaatgcggttgcgggaggctatgtcgggttcgacttcggagccgctgtcgccgatattcccgccggcattgtttggatggctgcgaacttcgtgccctcggccgaatcgtttggcaagctcggccagatactctcgtcgcttgcgtcgacggtgctcgtttccattgcggcaagctgcgttgctgcggtgttcgcgttcgtgttcgccgtgcttggatcgcgctcggtcgggatcggcgggcctgtttcgatcgcggttcgcgccgtcgcctcgctgtttcgcaacattcccgtggttgcatgggcgttcatcctgctgttctcgttcaagcagagcgaattcacggggttcttcgcgctgtttttaacgagcttcgggtatttgacccgctgctatctcgaaagcatcgatgaggtcagcggaggttcggtcgaggcgctgcgggctacgggagcaagctacttttcgattgtggcccaggcggtggttccgatgtcgatcacgtcggtcatcagctgggtgctctacatgatcgaaacgaacattcgcgacgcgaccctcattggaatccttaccggcacgggcatcggtttcgtgttcgatctgtattacaagagctttcgctatgacatcgccgggctcgtcattgcgatgatcgtgattgcggtgatcgcgtgcgaggcgatatcgaattacgtcaggaggcagatcatatgacgaagcgagagggaggcgcgtcgctgcgcgagacgtctgcgaaagcggtgctggcggcagatgcggcaagcgatgcggctgctttgctcgcagctgctccgtctccgtccgccctgcgcgtcgggcttgcggcggcgggcgttcggcgcagccgatccggcaaaatcaaaacgcgcgtgatgaataagcagaatgctgccgttgcgcttgtactcggcgtgcttgcggggctgacggtgttctcgcttgcgacgatgaactacggcaaggtttccttctttgcggcgctctcgcaggcggctgaggattttctcatgatgatgctgcagccggggcttgcggggcatttcacgcttgccgatgtggtgacgggccttttcgtatcgttggccctcgcggtgctcaccacgttcatcggggcggttatcgccttcgtgttgagcctgttcgcagcagtcaatctgtcgaatagaccgctgagcaacgtgatcaaagcgctcatgtcgttttttcgcgctgtgccgacgatcctgtgggtgctcgttttcacggttgccatcggactcggccctgaggcggcggtgatcgggcttttgttccatagcatcgcctatctcgtcaaggcgtattcggaaagcttcgaagaaatcgatccgggcgtactcgaagccctgcgctcgtgcggtgcctcgtggtggcagacggtcttttcggcggtggtgcccgaaaagatgagcgagatgctctcgtggacgttcatccgcttcgagatcaacttcgtgaatgcggttgcggtcggcgcggttgcgggggcgggcggcatcggataccagctctttttggcgggaagcttctactacaacatccacgaggtcggcttgatcgtgtacctgtgtcttgccgtcgccatcgtgctcgaagtggcctcgaccaaactgcggaaacgctacatcgctcattcgtaagcgtccgtcatgcgggcgcacgcaatgaaacatatatgccaagcggctgcgcttgcggccgaaaaccgaagaatcaaggagttagtttgaaccgatacgaacgaacgcgcgtgcttgcgggtggagaccccggcgtcgcgcaggccattgcggccgaaatcgagcaggcgtgcgacgtcgaggtgctcgatgctccccgtgaggaacttgttatggtgaaggtgcgcgagagcgcccgaaacagccttttctatctgggcgaggcgctcatgtgctcgtgcagggtgcgaatcgccgacacgatggggttcggctacgtgctcggcagcaagcgcaacgcggcttacaacctggcgctcatcgatgcggcgttctcatcaggcgaagcgtttgagcgcatgtccaagtgggagcagcgaatcgaaaaagaagcacggcggcagcgcgagaagcaggcgaaggatcgtgcgctgatcgagcggacccgcgttgatttctcgactatggacggtgatgcgtgatggatgccgccctgagtgaaatccatcgtatccagcggtcttttcgggcggtgatggaggcgatggcccgccctggccgtccgacgatgatgccgcttgcggccggcgtgcagaaacggtatccgggaattcgaaagccgcttgcgacgctgatcgacatgctcgtcgatcaggcgacgacgttctcgattgccaacgggtgcgatggggccctcgccgatgccgtgtcggcggaaacgcacgcaaggcgcgtgctgcccgatcagtcggcgttcgtcatcgttcctgaagatgcggacgctccttgcgttgaaatggcggtcgcccatgctacggccgggtcgcttatcgcccccgaaaccggtgcgacggtactcatcggctgcgggcggatcgcgctgcgcgacgacggggccgaatcccccgacggcaacgcgaatatgcattgggtatccgtcgagggccccggggtgaaggagtcccatgtattcggcgtcgaccgcatcgattgggcgtgggcgcggaatcgccgcgaggacgagtttccctgcggcatcgacatcgtgcttgcagacgagcaaggagccgtggttgccgtgccccgcacctcgttcgtgtcgcttctggctgttgcgggaggtgcgaagtaatgggatacgttgccgtgcgaggtggtcgggaagccatcgaagagagcctgaacctgcttgagtgggagcgcgttcggtctgggcgaagcatcgatgtcgaaagcatccaatccgccttccccgatctcgtcgaccaggttatgggagagagctccctttacgctcccgagcttgcggcgcttgcgctcaagcaggcgcagggctcgcccgaggaagcggtgtttctgctgagggcttttcgctcgacgctcgagcgcccctatgtgagcaggacgatcgagccgacgacgatggaggtcgatcggcggatttcggcggcgttcaaagacgtgcccggcggacaggttctcggggcaacgcgcgattatacccaccgtctgctcgatttcaacctgcgggaggaagacgacgattctcttcacgaggcgaaaaagcgcctcaagcgcgagtggaagaagcgggtcgttgcaaaggcgcgcgaaaaactcgaagcgcagtcggatgggaggggctttgattgcgaaagcgaagggcgagatttcggcaggcttcccaaggttgccgactacctgcgcgaagagggtctgcttgtacagcatgaaccgaacaacgaggagcccgttgatgtgactatggagccgctcgtgtttcccgcgccccgctcggcgcgcctgcagacgcttgcgcgcggcatgacgcaggccgtcggcgcgcttgggtatgcggcgatccgcgggttcggcccggcgcatccgacggttgccgaactgcgccacgggatcatcgagatcgcgatcgaccatccccttgggtcgggtgcggcagaagatgcgtattgcgtggggtcgatccctgtgaccgaggtggaatcgctgttcgaggtggagacgcagaacccccaaggagagaaggagcttgccttcgaactgggctacggcatggttatcggccggggagaaaccaaggcgatcgcgatgagcgtgcttgataactgcctcgagcagggagataagcgctttccgacgcaggatgaggagttcgtcttgtaccacgtcgacggcatcgaggcgacgggtttcatttcgcatctcaagctgccccattacgtgacgttccagtcgaagctttcggctgtgcgaaaaacaaggggtgacgaagacggcgtctcgggcatctgtgcggacgcgtccgtcgccgaaggctccctctccgctcagcaggctgtgtccgacgagatgcgaaccgccggcgcgccccatgcggcaaaagccgacggatcgatcgacttcgaaaaggaatgagtgcaatcatggaacagctctacaacttcgccttcttcgatgaggcgtcgaagcgcgagatcaggcgggcgatattgaaggggatcgccatccccggctaccaggtgccctttgcgtcgcgcgagatgccgatcggacgcggatggggaaccggcggcttgcaggtaacgcttgccatcatcggttcggccgacgtgctcaaggttatcgaccagggctccgacgagagcgtcaacgccgtcaacatcaagaagctcgtgtgcgcgacaaccgatgtggaaaccactgatgaaactgcgcgggcgagcatcatccaatcgcgccatcgcattcccgaagagcccctgcgggaggaccaggtgcttgtgctgcaggtgccgacgcccgagcccctgcgcgattttgagccgagcgaggctgtgacgcgcaggcttcatgccgaggccgattacaccggtgcgtggcttggccttttcgatcagatcatccgtttcggatcgacgacgacgggggccgatcatcccgtgaaggtcaacgggcgctacatcatggcgccgtctccgattccgcgtttcgacacgctcaagctgcacatgagcgataaccttacgcttctgggtgctggccgcgaaaagaagatctatgcggtgccgccctacaccgtggtcgagccgctcgattttgccgaccatcccttttccgtcgaggatttttcgggcaagtcgtgttcgatctgcggcgcgaccaacacctatcttgacgaactcgtcgacgaggaaacgggcgagacgtactactgttgcaacgatacggcgttttgcgcatcgcgcgtagagcgctcgatgggaggtcttgtccatggaaaccgttagtgcgagctgcgtgatcgaaggcgccaccgccgtccctcggcaagatcggcatcagggcgcgtccgttcgtcttgtgcagccacgggcgagcgtgcgtgcgaagcgtatggaagagacgccctgcgtatcggttgcgggtttgtcgcgcagcttcggcgctggttgcgattactgcgccgaccccgcagcgccgctcgagcgcaaccgctgcccgaaatgcggcaccgtgcatgcggtgcgcaacgtggacttcgagctgtatccgggggagatcgtcggagttgtgggcgaatcggggagtgggaaatcgacgctcatgcagtgtatgtacttcgatcaggaggcaagcagcggagaaatcctcgtgcagccctatgacgggggagcgcgcaacatcctcgaactctcctcgcaggagaagcgccgcattcgcaacacggtgttcggcatggtctatcagaatccctatctgggcctgcgcatggactactcttcgctttcgaacatcgccgagcagatgatcgcttcgggcgacagaagcgtctcccatatgcgttcgcgcggcgaagagctgctcgggcaggtgaacatccccaccgttcgtgcaaccgatccgccgcggacgttttccggtggcatgcagcagcgcgtccagatcgccaaggcgctctcgaacaacccgccggtgcttttgcttgacgaggtgaccacggggctcgacctgtccgtgcaggcgaacgtgctcgacttgattctgcagatccgccgtgatttcaacgtgagcatgcttgtggtgagccacgacctcggcgtgatccgcatgctcgccgatcgcaccttcgtgatgctcgatggccgtgtgatcgaggagggcctcaccgatcagatactcgaagacccccagcatgcctacacccagcagcttgtgtattcgctgctgtgagcaggcgctcgaaccgagtgccgttgacgaaagaccgatacgaaagaaggaagcaagcttcatgaacgatacaaccctcattatctctggaggaacggtggtctgcgaagacgcggtgctgcccgaccacgatgtgttcgtgcgcagcggcaggatcgccgccatcaggccgagtgcgggataccgcctcgccgacggcaccgatgattcgtccttggcgatcgtcgatgcgcgaggcgcttacgttgctccgggtatgatcgacgtccattccgatttcatcgaaacggtggcaagcccgcgcccgagcgtggtgatggacttgcgcacttcgctttaccaggcggagcgcgaactggcagcccacgggattacgacgatattccattccctttcggtttacggcgcggcgatcttcgatcacaagccgattcgcaatttcgaaaacgtaatgaatctcgttgaggaggtgtccgccatgcgcagcgtcgaagaggcagagcacctcatccgccaccggctgcacctgcgcatcgagatcgattcggtcgatcgctacgatgcgatcaaagaatgcatcgccgcgggctcggtcgatatgatctcgttcatggaccatactccgggacagggacagtacagcgatctcggcattttcggcaacacgctcaaagggtatcgcgatatcagcgaccaggaggtggcgcgtattatcgaggagcagcagcgaagcgacaagctctcgcttgcccagatgaccgagcttgcccggctggcgcggcgtcgcgggatctcggttgcgtcgcatgacgacgacgcgatcgaaaagctcgatcgcatggcggcgctcgatgcggcgatatccgagtttccgattaccatggacgtcgcccatgaggcgcgcaagcgcggcatgcatacgcttgcgggagcgccgaatgtcatgatggggcattcccattcagggaatctctcggcgcgtgaagcggtgggggaggatgcgatcgacatgttgtgcagcgattactatccggctgctatgctcggcgctgtatttgcgcttcatcgcatcgtcggtcttgatctcgcgagggcttttgcgttggtaacggcccatccggcacaggccgccggcatatccgacgaggttggatccatcgcggtcgggaagcgcgccgatctcattgtcgtgagggagctaccggtgcggggcgcttcggaagacgagtccgttcccgtggtgacggaggcgttcgtcggcggtcggtgcgtgcatcgcagcctctatcccgcgttcgaggacgttttggccgacggagacgctcgtcgacggcgggcagccgatgcccctgtcgccgccgatcaggcgtccgccgatcgcggcgcgctcgattttgcagcggcagaggatgaggctgcccagatcgatttcgagaaagcgcaggcggtccgatgagcgccgtcgagtgccgcccggcgcaggcggccggggtttcgcgtggcgaggagacggcagctgagaacgagttcgggcagatgtcgattgacgaacaggcggaccagatgccgttgctcaagatttcggggctttccaaatcgtttaccatccatgccgtcgatcggcatatcaaagggtgctcgaacgtcgatctcgacatcatgcccggcgagttcgtgggcatcaccgggaaaagcggcagcggaaagtcgacgatcctgcgctgcatctatcggacgaatcttcccgaagcgggcgccattctctacgattcggctgcattcggcaggatcgatcttgctcgggcaacgcagcggcagatgatctacctgcgcacccatgaaatcggatacgtctcgcagtttttgagcgttttgccccgtcgcagcgcatatgatatcgtcatgcagagcgccattgaaacatacggatgcaacgcccaggagaagtgccatcgcgagaccaaggcgatgctgcgccatttcgatttgacggaagatctgtgggacgtgtatccgcggacgttttccggaggcgagaagcttcggctcaacatcgccgccgccatgatcaagcagccccgtttgcttctgctcgacgagccgacggcctcgcttgacaacgcatcgaagatcaaagtgcgcgagctgatcgagcggttgaaggggcagggcacgacgatgctcggcatattccacgacctcgagttcatggaaggcttgtgcgatagggagttcaacatgcaggaaggcatgatggtatgaatcgggaagaatgcggggatcccgctgcgcgcactgggcgggcgtcaggcgatttgcgggcacgggccgcggcaaccgaggccatgctgcgctttctcgaagatgcggctgcgtcgggtgcgcggtcggatctccatgtgcacacgacggtgtccgacggatccgatacctttgccgaagcgctcgcccaggtgaaggagcgcggaatctcgcatgtcgcattcacgaatcacgatacgacggccggactcgacgaagcgatcgcgctcggtgccgatttcggaatcgaggttatcggcggcgtggagatcagcgcatgggatagccgccgcaagcgcaaggtgcacgttctcggctacgggctcgcctgcgagtcccctgccgtcgatgcgctttgcgctccgcttcttgcgcgccgaaacgagaacacgcaatggcagcttgatcggctgctggaagcgggctatcaggttgatgtcgatcgggtgcacgcgcttgcgctggcatcgacggcgctgtacaagcagcacctcatggcagcgcttaccgatgagccgtacgcatcggatgcgtatcaggggctgtattgcagcctgttcaaaggcgaagggatatgcgcgcgcgatatcgaatacgtcgatgcatgcgatgcggtgcgggctatcgttgccgacggcggcgttgcggtgcttgcccatcccggccagcttgacagctatgcgctggtcggcgatctgacggcatgcgggttgcggggcatcgagaagcaccatcccgaccacgacctgcatgatcaggaagcatgcgacgagcttgccgaacgctacgggcttgtacgcacgggcggctccgactaccatggtcgcttcggtcgaattccgcatatcggttttgggtgcgaaagctagaacacgaacagatgtttcacgtgaaacatcggcgaacgcggggcatcttcggtatactggttgcgatcattgaaaccgattgcgggagatgcatatgcgattcgtctcatggaatgtgaacggcctgcgtgccgttatgaagaaaggcttcgaggagatcttctcggaattcaacgccgatgtgtttgcgttgcaggaaaccaagcttcaagagggccagatcgatctcgatctggccggctaccatgattattggagttacgccgagcgcaagggctactcgggaacggccgtgttcaccaaggaggagcccctccaggtcatccacgaactcggcatgccccatcttgataccgaggggcgcgtggtggcgctcgaattcccagagctgtggttcgtcgacgtgtacactccgaacgcgcaaaacgagctcgcccgcatcgaccatcgcatggaatgggacgatgcatttcgggaattctgcaaaggcctcgaggcgggaagccttcctgccggcgcgcaggccgcggcgccgaaacccgtggtgatgtgcggcgatttcaacgttgcccatcaagagatcgacctgaagaaccctggccccaaccgcggcaacgcgggcttttccgatgaggagcgcggcaagttcaccgaactgcttgacgcggggttcaccgacacgttccgacacacgcatcctgacctcgcgggcgcgtattcgtggtggagctatcggttcaacgcccgcgcgaacaacgcgggatggcgcatcgattactttttggtgagcgatgagctcgttccgcgcataaagggagcgtccatctacagcgaagttttcggcagcgatcactgcccggtagcgcttgagctcgacatttgacgagcgcgcattctcgcacgaaagcgccgaatgcgtgcggtgggcgcgcgtctgcgttgcagccaatccttgcgcattcccgaattgcgcattccggaatgcgcggcagggaggcacgggcggatggctgatgcagggcggaaaagaagaaggggctccagcgggtgtggctggagcccctttcgattaagcgttgttcttgctcgcgagcgctttgccgcacatgcgaccgaacgttgcgcatcggccggcgttggatcctgcacccagattggggtaggtgtgcgcgtagtagctaccggaatcgttcccgatgacgtaaagaccctcgataggctcgtttttctcgtttaatgcctgaaaatcggtgttgatctttatgccgtccagcgtgcagagggcaaggccgcctatcttcacgccgtaaaaaggagccgtgcgcatttccgacaagcgaaacgcctctttcccgtattgggtgtcttcttgggcgtcgtagaggctgttgtaggtgtcgacggttttcttgaatgcatccacgtcaaaacccagcttttccgcaagctcttcgatggtgtcggcttttacgacttttcccgcttcgatgttcgcttcgatgttcgcttcggttccatcaaggttgacgggatcgagaatgtttccgccttcacggatttcgagcgtcgagcaaccgacggtatggaagcgatggacgtcctctttccaattggcgtcccataccggataccaggcacggtttcccttcatcgacgctgcatggaccacatagtcgtacgggctcgattcgttgcagatacgatttccgacagagtcgaccttgaggaacggttgggttgcgaattggaaatagtcgaaatccatatcgaacggatgcccgatttcttgatcgggcttcatgatgccgcggtcgaagaccatcgtggtctttacatcgtcgaaccgtgcgccggcccacatgcaggccttgatcccttctccctgcgcgttgaaattagcgaagggcacaacgcctacgaggcttttgaccaattcgccctgtagagcttcgtacatggcgaaattgttcgcatagccgcctgtggcgacgatgacgccgttcttcgcattgatgcgcatgcgggttccgtcggaagtggatgcgtatgcgccgactacggcaccgtcttcgttctggatgagccgatccatgcccgtttcgtacatgagttttgcgccggcgaagctgagaaaatactcggtgagcacttcgacggtcgtggcttcgcagctcctgttgtctttgcccatttcttcgcgcatgatgatagtgccgtgcccggttgggtaggctttgtagcgaagatcttcgctgggcatgttgtattcaaggtctacctgaatgtcttttacgccatctacgcgatcgcagtaccagtcgagggcttctccggaattgtcagcccataagcggacgagatccatattgttttggttgcaggcgtagcgggcgtaatcgttgagaagctcttccttgtcgatcgtcacccctgcttctttttgcttgcgggaatcgatggcgccaagagccgatccgcgtactcccgcgcctgtttcgtacttttcgatgagcaagacgtttgctccctgttctgcggcggcgcatgcggcgaaccatccagagcatcccgcgcccacgaccagcacgtcggtatcgatggtttcagagcagtcttcgtcggttatcgccggggcttcgccgagccagtcggcgggcgaaggagtgctcgatgcctggtctgccgtcgaggcagtgctttccttgtcgttttcactggcttgaggggagcagccggtaagtccgatggctcccagtgccgttgccgcgcctgtggcaagggctcccgtcagaaacttacggcggtcgattttcggtgattccatagattcctcccttttcgagggtccgttcctcttgtatgcatgcttgcgggcgaattggcgattcggactccaatgcgctccgtcgtgcgattcaccatagcggcatggtggctggcccgcatcgctgcaaagcgtggatttaggaaaatcaatggtatcgggggaggtcagggggcatccccttttttcagggagtgttgcggcacatgcttttcaagtagaatggcgtagcaagtggaaggggttatcggtttgagtctttcgaaaagtctaaatcggctcgcagagacggtgaaacttcgttatttgggcttggggcttctgtggtcgtggatctactgtctgtggttcagccctgcggtattttcgtcggacaacggcgatgctggcgggataacgtggcttgtctccctggccgcttcggctgctgctcttttcgtgctcgcaatacgcccgggccgagaaaagcggcttcattccgcatggctctacgttgctcccattggcgtttccctttccacgttcgcacttttgcttgcgtccgacggcgttgttgcgtgggctagcgcggcggtggggggacttctcactgctttcttatgggtgcagtggggcgagctttattgctcgttggacgaagaggtcatggaggcatgcgttccgtcttctgccataatcgtgataggatcggctttgctgtcgataggtcttccctcccttgcggcgggagtgtttgttgcgttgatacctttggcttcgggggccttgatgctggtatgccatggagacgaggcgtttgtcgttcccccgtttaagcttgccaacagcaagaaaggtttaccgtctttgctggttaggcttggacttgtttctatggtttgcgcgatggcctcgagttttatcttggctctttcggaagagtcgacctcgcttcttttcggttcgctttccatcctcgcggtcgctatcggcgctcttttcgccgtcgcgctttcgttggtactcattttctttgcgcgaagaattgattttgcaagtttgtatcagtgggttgttcccatcctcgtgctatcgatatgcctgtttattgcagggggccgcaatgccggaacggtttctttggcgctttcgttttgcgtagcgtttgcggtggattgcctgttcatgataattgcggctcgaataacgaaaaaggggctatgcgcacctgccgaagcgttcgggatatttcgcgggttcgtgcagacagggtgcttcgctgcggggttgattgcaagggcggctgtggatcttcacatagaattggtgcatatactgcttgctttcgtattcgttagcgtgatcgcgttggtggcggtcgttcgtctgcaggaagagctcaaaaaccttaccaacccgccggtttcggtgaacgcgtctctttcgtcaagcgatgaggacgccgtcggtcgcatggcggagcagtaccggctctctccccgtgaagttgacgtgctgcgattgctctcccggggaaggtccgttccttacatgcgagatgcgcttgtcatatcgaagagtacgatcgagacccacatcaagcacctttatgcgaaagccggcgtccattcaagacaggagcttatcaatctgcttgagagctaccgccaggaagcctagaccgtacggaagggctttcgcagccaatccccgcgcattcccgaattgcgcattccggaatgcgcggcagggaggcgcgggcggatggctgatggctacagcgcagtgcctttggcggggcggtagaggcggctcatgtcgacgccctcgtgttcgagcagccagatcttcttatcgagaccgcctgcgaatcccgtgaggctgccatcggctccgacgacccgatggcaggggacgatgatgcttatggggttgtgtccgacggcgccgcccacggcgaggctcgccatggtcttctttccctgccgttgggccaccagacggccgatctcgccgtacgttatggtctcgccgtagggtatctccgtgagaacgcgccagacggcttggcgaaaatcactgccgatgggtgcaagcggaagccgcctgatttcggggcgttttccagtgaagtactcgtcgagccattcgcatgcgtcatctaaaaccgctgctgccgttccgtcgtctggagtcatttcgccgggtatcgtacctccgaagtatttctgcccgctcatccaaaggccgcaaaggccggttccgttgctgcaaagggttatgccgcctatgggcgattcgtagtcgcgggaaaaataggttgcgctgttgcttaccttggtcatgttcgtcgatcctttcgcgttcgcgtttttcctattctagaggatggagcgcgctgagctagctgttttgggacatgcaaaggggtaacagagcggtttgctttcgctgacaaccgaagccggcatgctcctgcctgaacgctcgaatgtccggtttttcatcgggggtcttgcgagtccatgtcgattgcgctttggcggccgagcgaaacgatgctgcctgcatatagccgagaagctacgcgtccgaagcccggcgacgggcttgcgcgaacggttcgatgtccgaaagcagctagctaccgcagtgccggcagtgtagaatctgcccaaacgcgataggagaaacgtatgggtgcggcaagcatatgcaagggcgaggttgcgtcagggcgaaacgccgtgttaggcgaagcgaagagctcgggtagcgaagaatcccgcaaacgagccctctacaaagctttcgagtcgaaagacgcccgcttcgacgggcaggtcttcgtgggcgtgtcttcgacgggcatctactgcaggcccgtatgcccctatatgccgaagttcgaaaactgcacgttttacgaaacgtccgccgaagcggagaaggcgggctaccgcccttgcttggtttgccgacccgagctcgctcccggcaattcgagcgtcgatgcgtatgcgaatctcgcgcagcgaaccgctcggctcttgaaggagaactgcacgagcggggagggcatggagcggcttgccgcccgcctcgggtacacggggcgccatctgcggcgggcgttcgagcgagagttcgatgtgacccctttgcagtatcttcaaacatgtcgcttgcagttggcgaaatcgcttttagccgataccgatcttcccatctcgcaggttgccgtagcttcgggcttcggcagcgtgcgccgcttcaacgacgtgttcaaacagaattatcggttgacgccgagcgatttgcgcaagcgcggaaacaggcaggcgcgtttcgaaggagccatcgtcatgagactcggttatcgtcctccttatcgcttcgacgaccttctcggcttcttccgcctgcgtgcgctcgacggagtcgaggtggtcggggacgatttctatgccaggacggtgcgcattttctccggtgaaggcgatgcggtcacaggttgggtgcgcgtatcgaacgatgccgatcgcaacgcgcttgccgtgaccatgagtgaatcgcttcttcctgctacatcgcagatcatggctcgtttgcgccgtcagttcgatacggattgcgatccttgcgcggtgtacaaggggatcgcttcgcttgacgaggctgtgtctggggcggctgtgccgggcacgcggcttcccggttgtttcgacgggttcgaaacggcggttcgtgcgattctcgggcagcaggtgacggtggcggcggcgaacaagcttgcggctcgcatcgtcgaaacgtacggcgctccgatcgacacgggtatcggggggctgacccatgcgtttcccgcgcctgaggaagtcctcgcgctcaactcgatagaggatgcgttcggcgaactgggggtaatcaggacgcgctcgcgcaccatcgccgagatcgcgcggctccttgcggaaggcgagctcgatttcggctcgggggcgatcgtgtccgagcagatggaacggctgcttgcggttaagggcatcggcccgtggtcggccaactacatggcgatgcgcatcttgagctaccccgatgcctttatggaaaccgatgcgggcatcaagcacgcgctgcctgatttctcgcctgccgagcgcctgcgccttgccgagaagtggcgtccctggcgcagctacgccaccatcgccctttggaattcgctcggcgcgtgatgagggggttggggattcgtttgcggtgagcgatcggggcgcatcattcgttgtggagtacgatgcgcagagagaggggatgacggacgatcgccatcccctgcatccaatcgcgaagagtgctgcccctgcgcccgtgcctcttacacttcctcgaagaattcctcaccgcgcagcagctccacttcgagcagatcgccttcttgccacccggcttcgccgatgggggagatgcgctgggcgttcgacgccatgcactcggccagctctcccgccttgaagttatggaagcgcacttcgtagccgtcggcggtgcgcagcaggtcgcagcggccgatgttcgccatcttcggcacgcttcccgaggtggctgcggccttcgccatgaccgtcgggcgcttgtgcacgggtatgccgaggatgcgcgcggtgatcgcctgcaggcaccactcggtcccgtaataggcggcaagcgtgggtccgggcaggtcgacgaccggcttgccgtcggcaaccgccatcatgagcggtcgtccgggcacggctgcgatgtagtggcgtatcacgctcccgcgtttctcgatcatgcgcacgttgaaatcttcctcgccgattgcggagccgccgttgatgacgacggcgtcggcgacggcaagcgcttcttcgaacgcgcgctcgagctcggcgggatcgtcgtggacgatggggaatacgatcggctcggcaccgaattcgatgagcatgtgcttgaccatgagactgttcgtatcgacgttctgaccgcggcgcggtttgatgcccgcgcacacaagctcgcttcccgtggggatgaacgcgatgcgcggcttgcggcgcaccggcaccatggtggcgcctcccatgcagagggccgccaggtcggtggggcggatgacgctgcctgcggaaagcaagggcactcccgccttaagcgttgcgccggaggggtttacgcccgaccccgcctcgatcttcacatcgtcgtcgagaacgaccgacccgtcgggctgaatggccgccttctcgatcatgatgacggcatcgaactcgtcggggaaatcgtcgccggtgtcggcgcgcacataatcgacgccgcgtttccaggtgctcgtgtcgggcagcccgtttgcgaacgcagccgatttcacggcgatgccgtcgaacgacgatgagcgcacgacgggcaacgtgttggtcgaaaccatatcgcgcgccagcacgcgaccgaccgattcgtcgagtgagacgagttcggtttcctgcaccggttcccatgccttgaagaaatcggcaagcgcttcttccttcgagggaaagccgtccataatcttttctcccacaggtcctcctttacatcccgcagagcaaaatcctctcgctttctagcaaggatactccaagtttgagaataattcatcttgaaatattatactcatcaagatatattattctaatacaaagatagtttgccgatgcaggcgggaacctgtccttcgggtacagggtgcttcgaaaagcagggggatcatacgtttgaagcttgagggaaagcgcttggggaaagcgggcggccgaaaggcccttccgatcatcaccgttttggtggttgtgctcgttgctgccgtgctcgtatcgtttacgctcggccgctacgatatgaccgtgctcgacgtgctcaaggtggcagccaatcagatgttcggcatgcagacgtttcccgagtccacgcatatcactgtcgtcacccaggtgcggttcccccgtgtgatagccgcccttgtcatcggcgctgcgcttgcggctgcaggtgccagctaccagggcctgttcaagaatcctatggtttcgcccgatttgctcggtgcttcggcgggtgccgggttcggcgcatcgttcgcactgctcatgggcggcaacatgtatgtggttcagctctccgccttcgtatgcggcattgttgccgtgctgcttacgtacttcgtcagcacggcggtgagcaagggcgaatcgatgacgcttacgctcgtgctaaccggcatggtggtcacggctttgtttcaggcgttcatcacgatgaccaagtacgttgccgaccccgacgacaagcttccctcgatcacctattggctcatgggcggcctttcgtcgatgcggatcgaagatctgcccatgctgctcgttcccgttgtcgtgggcatcgtgccgatgcttttgttccgcaaccagctcaatgcgctttcgttcggagacgaagaagcgcgcgctctcggcgtcaacacgaagttcatccgcgggctgttcatcttctgcgccacgctcgttacggccgcttcggttgcggcggcgggtatggtgggctgggtcggcctcgtgatcccgcacctcgctcgcatgatcgtgggccccaaccacaaggtgctgctgccggcctctcttctgctcggcgccctctacattctcatcatcgacgatctgtgccgatgcctgtttgccatcgaactgcccttgagcgtgctcacggcaatcatcggtgcgccgttcttcatctatctgttgacgcggggaaggaagacgtggacatgagggaatttgctcttgatggtgtgacctgcgggtacaaggatacaacgatactgtctgacgtgtcgttctcgattggtgcgggcgaggctctgtgcctgctcggtccgaacggcgtggggaagaccacgctgtttcgcagcatgctcgggttcttgaagccgttcagcggcaagatcacgctcgacggggacgacatatccacgtggtcgtcacgcacgcttgcgcagaagatcggctatgttccgcagaaccacacgccgccgttcgcctatcccgtgatcgacgtggtaacgatgggcaggctttcccgtatcagcccgatcgcctcgccgtcaaatcgcgataccgataaggcgtacgagtgcctggagcggttggggataagccatttggctgacaagctttacacgcagatcagcggtggcgaacggcagatggtgctcattgcgcgctcgcttgcgcaggagcctgaggtgctcgtcatggacgagccgactgcgagcctcgattacggcaaccaggtgagggtgctccgccagatctcgcaactggtgaaggagggcatttcggtcatcatgacgacgcattttcccgaccatgcgtttctctgcgccacgaaggtggggctcatcacgcgcgaatgggtgcgcttcggcacgcccgatgaggtggttaccgaagactcgctcaaggaaacgtacggcgtcgacgtgcgtatcgtcaaagagcatacctgcaagtgcggaacgctcaaggggtgcatccccatcgtcgaattcgccgcagcaggagacggcgcggatggcatccgcgatcgtatgaggggcattccatcgtcgcagaagcatgtggcggtgtgtgcataaagtccgtcgggtcgtcgcgatgcggcggcggcggacggcgcgcattgtttcagaccgcgcgcaggtgccaacaaagggagagatgaaaggaaccatatgaaacgcaagatagcagcgctgctcatggcttgcatgctcgcgcttccgctcgttgcgggatgctcgagtggtacgaccgagcagaagcccgccgaaaacaaggatgaacagcaacagcaggcagagccgcaagcgaccgagcgcgagatcaccgatatggcgggtcgcacggttaccattccaaccgaagtgaattccgtgtactgcgccgttccgaccggtgaggcgatggttgccacgctttcgcccgagaagatcatcggctgggtgaacgagccgtctgctgccgccatggaatacttgcccgagaacctggcctccatgcccgttatcggcggttggatgggccagcaggttacggccaacatggaagatatcatcacgctcgatcccgatatcatcatctatgtgggcaccgacggctctctcggcaatgatgatgtgcccgatcagatccagaaggaaacaggcatcccggtcgtctgcgcgtcgagcgcgcttgagcgtaccgccgaagtgtaccgtacgctgggcgattggatcggcgaagccgagcgcggcgaagagcttgccacgtactacgagacgaagctcgccgatgtggtcgagaagatagacgccattcccgattccgagcgcccgagagtgtactatgccgagaattccgacggactcgccaccgatcctgccgggtcgtctcacaccgaagtgctcgactactgcaaggtaaccaacgttgccgatgtggagatgaaatcgggacagggtcgtaccgaggtttccatcgagcaggttatcgcgtgggatcccgagctcattttgtgccattcgggattcgtgctcgctgacgacataacgagcaacccgcagtgggccgatatccaggccgtgaaagacggcgaagtctacacgacgcccgccgtgcctttcaactggttcgaccgtccgccgaacgtcatgcgcctcatgggtatccagtggttcgcgaccgtgtgctatcccgatatcgacatcgatatcaatcaggagacgaaggacttctacaagctgttctacaagatggatctgagcgacgagcaggttgaatcgcttctgaaccagaaccagctcagcttcaactaactttaccgagccatggaagcagaggccatacaggaaaactgcgagccgtcttgccaggcaaggcggctcatggccattcccggcgtattctacgggggcggctgttcgtacatggcatgccgcgggttgatgatgagcggcatcgaagatgtgctgctgatcacccacggtccggtcgggtgcgcttatttttccgggatcaacggatatcgcggaccgaacggtgcgccgcgtcctcggcacatcgctcgcacgttttcgacgcacatggacgagacggatgtcattttcgggggcgagggcaagcttgccgattccatcgacgaagcggtggagcgctacgctccagaagccatcgcgatctgcgctacgtgtcccgtagggctgatcggcgatgatatcaggcaggtggcacgcgatgccgccgagaggcacggcgtcgatatcctgccgctctcatgcgaggggttcaaaagcgaaccgggatggctgcacgggggaaggcagatcctcgacaattgggtcggtcgcgaagatgggagtgcgggcgagtttcccatccatttcatgagcgaagcgtgcggcgacgatcgcgcacgcgagatgaaagaccttttcgatcgcatcggctacgacgtggtgtgctcgcttatggggataacgacgtatcgcgatatcgcgcgcagccacaaagcgaagcttgtggttctcgattccgggaaggcgatagatgcggtgcctcagctctaccaagagcgctacggggcggggttcatgcgcgtgagcctgacgggcatcggaaacatcgcggcatcgctgcgctcgatggccgcgcatttcggcgatgcggatctgacgcagaggaccgaagaggttctgcgcgcggagtgcgctcgcatcgagcccgtgcgcgcgcgatgccgagccgagttcgaaaacatgctcgttgccgttttcgaggacattttccgaagcaatgatttcgcggtgctttcaagcgagctcggtatggacgtcgtcatggtcgcccaagattacgagaccgaggtgtacaccgaagaggggttcaccgtgcatgcgcccgtgtcccgcattgccggcttcgatgaagaggagaaggcgctcttcggattcgattgcgcccaattggtgcgaaggctgcccggttgtcccgagatcgattgcccggagcgcgagttttcatggctgcgcgtgaggctcgatcgcacccaggtgagcgatcttctcgttcgcctcgcacccgatctgtgctttgcaggcatcgaagagcggttcagctatgcgagcgccgccatgcgctcggagaagtttctatcagacgaacggggaaccgactacatgggcttcgacggattcgagcggtacgcgcgcgatctctcgcaggcgcgcgacctttcacattgggtgctcgagcggccgacgtggatgaaaggcggtgagagcgatgggtagcgagggcaaaaccagatcgctgtgcgttgatccgctcaacccctgctccccgatcggcgccatgtatgctgcgttcggggtgcacggcggcttgccgctttcccacggcgcatcgggatgctgccggttccagcgcatggagcttgccaagcattttcagaaaacggtgcatgtcccctcgacgcttctgcgcgaccgggcggccatgttcgggggcgagcccgaaatcgaagaagcggttgaaaacgtgtttcgcctgtacgaccccgaggtgctggtcatcaacaccacctgcctttccgagacgatcggagacgacttgggcggtatcgttgacaggcttgcgataccggtcggcaaagcggtggtttgggcttcgacgccgggatacgccggctcgcagctggcaggatacggtgcgaccgtggcggcgctcatccgccagctcggcggcagctgctcggccgatgccgtcgaggttgcgaagggttcgggagcgcaatcgcgcgatgccgggcgcctctgtctgctgccggggtggatgaacccctgcgatgtcgatgttgccgtccgctatgcggaagcgctgttcgacgaagtgaccgtgcttcccgatgtgcgcggggtcttcgatcgcaagagccccgacgatccgtcggtctacgcgcctggcggcacgccgcgcgacgagatcgaacgcatcggcgagtgctcgtgcggaatggcgctcgggtgcgaggcaaccttcgagagctcgcgggctttgtgcgaagccgcaccgcatgcggcggtcgaagagctgccgcttcccatcggcatttcggcgaccgatcggctgatcggatcgctcgcggagctttcgggccgccccgttcccgcatggatcgcccgcgagcggacgcagctgatcgactgtctgatgcaggttgccgatcagctgtacgacaagcggttgctcatctgctgcgacgccgatcttgcggaagcggcggccttgttcgccgttgatgcgggcatggtgccgagctgcgttgcggtcggcgatgctgcttccgatttcgaggagcgccttcgcagcgatggtgcgcttcctgatgggtgcgaggtgctcgcgggcgtcgatcggctggctgtcgaggaattcgttgcagctcatccaatcgatctcgtgcttggcgatacgcgcaacaagcggcttgccgcgcgggcgggcgcaccgctcgttcggatcgggtttcccgtcgtggatcgcccgctttcctacacgcgtccgattgcggggtaccaaggcgctctctcgcttctgcagcgcatcgtcgaagcgctctgcgacatcgaagaacgggctttggcgcctgaggatctttcgatctcccgatacttttagcaagacgagaaggcgcgcgccgatgccaggttcaggtgcgcatgccgttgatggcagaaccgttggaaggaagaaaagacgatggaagacgaatccgacgcaagaaaagatgcgagcggcttgcggggggaagcccgatcgcttcgccagatagcgttttacggcaaggggggcatcgggaagtcgaccacgagccagaacatcgccgccgcgcttggcgaggcagggcgcaagctcttggtggtggggtgcgaccccaaggccgattgcacctctcttctgactggcgagctgtttcaggaaaccgtgcttgaaaaggtgcgctcccaatcgcgcaacgccgcgcccaacgcgcctgtcgagggcatcgtgcacacgggctttgccgatatcgcctgcgtcgaatcgggcgggcccgaaccgggcgtcggatgcgcagggcggggcatcatctgcgctatcgagctcatcgagcggcagggcatcatccacgagggcctcgactacgtgttctacgatgtgctcggcgatgtggtgtgcggaggattcgccatgccgatccgcgagggaaaagcgcaggagatatatctggttacgagcggcgagatgatgtcgctatacgccgccaacaacatcgctacgggcatcctcaagttcgcggcatcgggccgaacgcgtctgggcggcattatctgcaattgccgcaacgtcgaaggggaagtggagctcgtgcatacgtttgccgaagagctgggcacctcggttgtgggcgtgatccctcgcgacaacatcgtgcaggcgagcgagctcaacaagcagacggtcatccaatacgctcccgaaagcgagcaggccgatgcgtaccgcatgctcgcacgcaccatcgaggccaacgagcgcttctccgtgccaacgcccctaacccgagaacgcctgcgcgagcttgcgcttgcaattgcccaagagggcatggatgcatcggaaaagtgacggtatcgcttacggcgtttcgcaaataggattatcgatccgatgcggcggacggtgcggacggctatggttcctttcgcaagagtaagggttctttgagggaggatcatcatggctcaaatcaccaagccgctctacacgccgcgctacgttccgtcgggcgaggagatggccgtcatcgatacgaacaaaggcgccatccgcgtgcagcttaacggaaaggatgctccggcaaccaccggcaacttcatcgaactggcatgcaagggcttctacgacggcttgaacttccatggccgcaaagagggtgatgtggtggtgggcggatgccccatcacaagggcgcttcggccccagcaggtgcgcatggccgtgcgcgaacagctgcgcggcatccatccgggcgtgggcgatccgggctacgtcatcaaagacgaatggacggaaaacccgaacaaccaccatgttgcgggcgctctttcgctcacccataaaaccaagcccgatagcggcagctgccagttcttcttctcgcttgccgatcatcccgagtacgacgatagattcacggtgttcggaaacgtcgtcgaaggcctcgatgtcgtgcagtcgctcaggatcggcgacgagatcaagagcattgcgatcgagggcgcccatgcgcttcccgacgacgatgctcttcccgaaaccatcaccgtgcgaaacgacgagggggaagagcagacggcgccgaaccccgattaccttgccatgcaggcgctcggcaagctgctcggcaagaaggttgcgatttagaggttgcgtttgatccagcgcatcagccggggccgctgaatgcggccccgagcctcgtcgatcctatgcatccgcagcctttcgcgcattctcttcgggttcccactcctcgatgaaatcgatcagctcctgttgcttgtggatgcccgtcttctggtagattttttcgatatgcgtacgggccgtgttcttcgcgatatgaagatcgcgcgcgacgatcgtaagcgttctgccgcgcgcgagaaacacaagcacctcttcctcgcgcggcgtgagcccgcattctcgggcgatgcccgagcatttctcttcaagggtaatcgtcggttcgcgctcgattgccggatcgggtttgggcgcttcggttttcttgccgggcattttgatggccgtcatcgaggcgatcgcgctttcgggtagaacgagaaacgcgatcacaaccaggcagaggattgcgatgagcgctaccgagccgatgcgcaccgcccctgaaacgacaagcgggttcagcacggcgctgagcacgtagcccgccgccatgccggtgaacgtgaacgccacgcccagaccgaacacgtaaggggccgcattgcgcccgatcctgcgagatatttcgccgaacagaacccatgagagtatgtcgaaaagctcgtagccgatgctggtggccagcacggaaaagtaggtgcgctgctcgaacagcagcgccatcgcgatcagtccggctatcatgatgggcagcgaaaggcggtagacgagcgagacgttcatcctgtccttgatgaaaaacgagatggcgagaaagattgctcccacgatgacgaggctgaacgaaccgcttccgcccaccatctcgaaggggtcgagatctccgatgggaaaggcgtcgaaggcgcggatgagaaacgagaacaccatgatcgataccaggagcttcgcggagtccttcccaagcctcatgcgatcgcgcagcacgccgtgctcgtcgggggcgataaccgcttcatcgagatcgtcttcgacgacgccttcgggcaggcccgtcttccattcgatcttgcaccgcttgcattcgaggacgagaaggagaagtgataggatcggcagcacgacgaacgtcagctgattgtcggttgacgacattgcgagcacgatgccggtaatgattgccgcggccggcgcgcaggcgagggagaagaacaggttttgggcggcgaaccgctcgccccagatgacttgcagaagacccgcgccggcacctccgacgatgagtccgagcatgagcaacgtcggcgaatcgagccatgccgccgctggaatgcatatcgccgagccgagtataagccccgtcatcacatcagtcagccgttcgtgcatgcgaggcaggctgccgacgaagcgtgtcatggccattgccgtcagcgaagccgaggcggctcctgccagcaaaaacacccaatcggttcgcgggccgaaacttgcgaccgaagccgacaagcatgacacgatccaagcgcggcacagcccgaatccgataatcacgagcatgtagtcaacgatgcttcctttgacgtcgagccatcccctgccgacgctttgttccccatcccgtgcgttcatgcccctcctgaatacaagtgtacagagcaagtcgagtccagtttacgcagcattcttaacacttaccagatcagttgcatatttccctcgactgcgttcgcacgatactacctgctttccaaaaaataatcactcggattattgatccgattgactttcaaaacacctgatcaaaggcaagaaaataaaaatataaaaaatcacatccgttatacggtgcttctttttcgcacccttcctacaattgcccgcattgccaggccgatcgtccaacaaggaggaggacgccgtcgcgagggagcgacgatcacgaagagtcggcctgttgattcaaggaggaactatgagcgaaggattgtctcgtcgtaatttcctgaagagcgctgccgttgccggtgctgctcttgcgggatccgccgctttggccggttgcgcatcgggcggtacgagttctgcggcagctccgtcaggggattggctgccgagctcttgggattacgagaccgacgtcgttgtcatcggatacggtggagcgggcatgtggtcttctctcgttgcagccgacgaaggcggctccgaggtcatcgtgctcgagaaggctcccgtcgagggcggcggcaacagccgcatcaacaacggcgaatggaccgttatcaaagacgagaagctgttccgcgattactgcattgcattcggccatggcctgatcgaagaggatatgatcgacgcctacatcgccgaggcgagccgccacaccgagtacgccgataagtacggcatgacctacgaggttgccgagcaggctctcgcaggcacgattcccgagtactggttcctcgacgacggcaagtatgccggttgcatcggcgtttcgagcgtcgagggcttcggtatgaccaccttccacgagctcgaggcgaagcgcgacgaactcggtcttcccgtcacgctgctgttcggctgcaccgacgagcatctgatccagaaccccgagaacaaggaaatcgtcggcgttaagttccttgagaacggcaccgagaaaaccgtcaaggctcgcaagggcgtttgcatgtgcaccggcggcttcgagttcaacgaggatctcaagaacacctatctgagcatctatcccttcaagttcgagggctggcagtacaacaccggcgacggcattcagatggtcgaagaagtgggcgcgaagctctggcacatgaacatggtcatctccacgaccgccatgtggactcgcgaccccgaatacgatttcgcgattttcgcaggcccgcaatccgatgcgttcttcacggtgaaccgtcttggcaagcgcttccaaaacgaatcgaagaccggcggcaccgcgcacaacggctggcatacgctcatgtcgttcagcgatgccatcgacgattacgaccgcattccctcatggcagatcttcgaccagcgaggtgtcgacggcggcccgatgggcacgcagcagggcggctggttcgagtgcggcaactacaccactgaccttcccgacgagattcgcgcatgggacggctggtctgacgacaatcaggtcgagatcgagcgcggctgggtgctcaagggcgatacgctcgaagatcttgcaaagaagatcaaggacttcgaccactggatggattacgaaacgctcaaggcaaccttcgacgagtaccaggcattttgcgatgccggcaaggacgcccgtttcgatcgcgagctcactgccgaagacaacaagctcaccgaagaaggaccttactacgccatctcgatctaccccggttcctgctcgacgctcggcggcccgaagaagaacgccaacgcccaggtgctcgatcctgcgggcaacgtgattccgcgtctgtacgctgcgggcagcttcggcaacttccaggctcacagctacggcatcaccggcggcaacaactccgagaacatggtatggggccgcatcggcggacgccactgcgccagcctcgagccgtgggatgcttctgagaagaaatagtactgcagaaaaaagcgattgcgcggatggattggcatccgtgcaatgagcgaaggttcggccgatcgcgcgagcggccgaacctcgaacaagacaggaagacgatgacgaacgcaacaacgaaaccaacgaacaaggcactcgcgctgatagccgtcatggttctgacgctggcgctgaccgttgtcctgggattggtcgtcggctgctcgccgcagggaggctcgtccgatgcccccaagggcgaaacccagcagaccgaaaaagaggacccgatggccaatcaggcagtcgagtggacgatggacatcgattgcaagacctgccataccactgaatccgaaagtatggccgatacgggcatcccgcaggcatccgagcatgctggtctggagtgcgtgcagtgccataccgaagaatccgtgctgaagacagcccatgagggcgtgacctacgcggacaagcccgcatcgaagccgacggtcatcactgttgacgccgagacgtgccaaagccctgattgccacggcaccatggaagagatggcggcgataaccgccgacaaccaagatttcaaggacgagaagggcaaagtccagaacccccatgactatccgagcaacgaacagcacgacacgatgaatccgacgtgcaccgattgccacaacatccactccaagaacctccagaaggatgcgatgatgtggtgcgctcagtgccatcacaagggcgtgttccagtgtggaacgtgccacgagctgcgcgagcgcgcagtgcagtagcgctgcgacctctctgcagcgcgtttcggcagccttgcggcgcgttgggcgatgctgcgggaccggccaacggtgctcgacggcgctgcggtgcaatcaggctgcgcccgatggcgctgcggctcagcccggccgcgcccgacggcgctgcggcaacagcccgacgattcggaagctgcttttcgaatcggacggtacgtacgacccctcgcgaaagacccggcgcttttccctccctcgccgggtctttttgcgcgctctggatggcccaaactgcacagtttttgccagattcatacattggggatgcttccaactgctccgaaagcatccaatgcaagcgcgagaaatgcgtttgcccagctcaggaattgttgaggcgtttgcggcgagttttgcccggcactggattacatccaacatgtatgaatctggcaaaaaacgtgcagatcgaggcgctgccggttcccgtcccgcccgtcccgcccgttccgctcgctctgcccgttccgcccgatggggtcgccgcaaatccgcttggcgcgatacatggcgggagctgttgcttgaagcggtggcgggcatgctatgatgctcgagtgcaatgaggacaacggaaaggaaccgagcgaaccgactatggatgcagcgaagatcgaacagggagtacgattgatcctcgaaggaatcggggaggatcccgatcgcgagggtttgcagaagacgccggagcgcgtggcgaagatgtacgaagaggtgtttgcgggcatgacccaggacccttccgagcacttcgagacgcttttcgacgagcatcacgaggaaatggtcttggtgcgcgatatcccgttctactcgatgtgcgagcatcatctggttccgttcttcggtcttgcgcacgtggcctacatccctgcggcaaacggtcgcatttgcggtttgtccaagcttgctcgtttggtcgatgcttacgcgaagcgcccgcaggttcaggagcgtctgacatctcagatcgccgacatgctggttgagcagctcaacccgcagggcgtgatcgtggtgcttgaagccgagcacatgtgcatgagcatgcgcggcgtgaagaagcccggcgcccatacgacgacaagcgccgtgcgcggtgcgttcgagcgcagccaggcgacgcgcaacgaagcgctttccctcattttcgcacccaggcgcacgatgtagctgctttttgggttgcggtcttgtgcgcgcgatctgcgcgcggcgccccttggcggtgtccatcatctgaagatgccgttgcggcaagggagccccgtgttcgcattcgcgacaatgcggtatagtaaatcgaaatgctcggctgtgttgaaagggttgtctatgaagtgcgtcgtatcggttttgggcaaagacagaagcggcatcgtcgctgcggtttcgaacgtgctcgctcagtgcggcgccaatatcgatgacatcagccagacgattctcgacgatatcttttcgatgaccatgctcgtgacgctcgatatcgaggttgccgatttcaacacggtgcaggagcgcctcgagacggcgggcaaagatctcggcgtccaggtgatcatccaacgcgaggacgtttttcagttcatgtacaagatctaaggcctgtcttttgtatcttgcaggcggtttgacgacggcttgcggatatcggcctgatcccagctagtcgtgttcaagttgattcttttcagcttcgattgtatcttggagttctcgtttattgtggacgtcaagtttggcgtacgtacgtttaacgtgcgttttaacggtgtcttttgacaagaagagatcgtcggcgatgctcgcaatgcttcttccgcgcgaataccggccgataatgtcttgctctcgggcggttactccatatttttcgcagagcgacgcaagcgccttatcggtttggttttcggaggcggatccaggtgcgccgtttgagttatccgcagccgccttttcggctctttcggttcttttgagcagggggtagaactcggcaacggtggcgacaacgaatataagcatgaaaacgaacgagaacgccataaaggaaaacttatcgagggagaggttctcgaaaaagaaaagaccgatcacgtttccgattgcgagcatgaccaaggcgacgccttgacagactcccaagccgattgtgtgatcgacgttcgtctttccgaatgagcggcatgaaacatagagcatcgattggaaggcggcaagccagatgctcgaaaagctccggatgagatcggttgcctcgctccaaaaaaatgcagtgagaatgagcactcccaagaaagcagcgagggttccgattgaaaaggagcgtatggaaaccttgccgtcggtaacggccatcactacaaggaaaactgcaagtgcgaatatgcaccaagagccaatctggggggttaggagccagagagacccttcgatatttgctccgatcctgaaccaaaccccaatcaaaataaggaacagcgcgattgcgccaaggaaaaagaacgatggagagttttcggtatattggcgtacccacgttttcgaccttgcgatgaagccgcctgccccaacatgcgttgacggcgtcatgcgcgacaagaagcctttttgacgcattgggagatagatgatgagcggaaccgcaatccctgcgaatgcgttcacaatcggttgagtgtctgtggcgacgacgagcatgccgtaagcgtacgagatgatgaaaccgatgggcacgatgcggtaaatcgatttatgggacgaaaaggagtagaggcagtatgccgaacagacgataagaaatcccgagtagagactgtaagagatgcttgccgcaagcgacagcatgacgccttgcgatacgatgccagtcgtttttactgtgattgcaaaaatttgaagcacgagcatcgcaacaaaaagggggagcggaatctttttcgttttgttgagcaccagggcgaagaggatgcagaaaattcctcgagttagaacttcgacgaatgcggttagccgcagatcgagcaaagcgtttgagaagccaatgtagcttgtgccccagtacaaaccgaatgcgatgcagcacgcgatcagggcagcggtgctcgcccgttttgaaaccgccatgtcccctccctggctctgacgttcgttcgccgaggttgaattgtaccgcatctttagtttcgaaaaacatccattaccgttttggcgacatataccctttttcgggtgacgaaaaactcctcatgaaacgcgaatgacgaaatacgggggacgcatcgattccgctgcgtttctattcttcacggtacgtgcaaaagcatgaacgcggtatacgtttcaggaggaaaacatgggagaagtaacacgtcgtaactttcttaagggagcattggcagtaggtgcagcggggatcgcgggtacggcgctttcgggttgttcgaatgcggaagcgtctgcgtcgagcgatatgccgaaaaactgggacaaagaagtcgatgtcctgatcgtcggagctggcagcgggttggctgccggagtcaaggccgccgaagcgggttcggacgtgctgatcgtggaaaagtcggatcatccaggcggcttctggatggcttcgggcggtggctgcacgatgggcggtaacaatatcgttcagcagcgtgcgggcgagaccgatgataacgagacgtggtttgaggatgaaatgttctcgtgcagctatcgcggcgacgctgacattatgcgcacgtttgtcgagcgcggtgccgagaccgttcagtggatggaggatttgggtatgaaatggggggatctgtcccaagggttcctccgcgggaagaccaagcgcggtttgtggccggtcgaaaaccccagcgtgtacgttggcggttggggcacgggcaaaaatgcaggtatttgctggacgcaggtttgggagaaccgtttgaacgaactcggagtccccatccttctcgagcatagaatgacgaaactttaccgtgagactggcggtcctgtcgtaggagctgaaatcgaaacaaaagacggagttatcaacatcaaggcgaaaaagggcgttgttgtggccaccggctcttggaccgacaatgaccatatggtgaaaatgtacgaccctcgggcggcaggggagttttgctatggcgatggcggcatcccggctgatggcaccatgtttaacgaagaaaccggcgatggtcagattgccatcgatgccgtcggtggcattctcaccgacatgtcttatgtttcatatctttggatttggttcggtcaaaaatcattttggagctggggagaggagccgctcgactggcgcgacaacaaaggctgggagcgcggaaagactttgggaacggatgcctttttcgaaaacggcattgtggtgcaaagcgaaggaaaacgctacttcaatgagaatcttgctaaaagcggggcatgctttgccggcggcggcgaagagggcgctgaagcggctgtgttcgaccaagacgctgccgttgcagcgatggaggcacttgcaggtaggggcgatcattgcgaaaaccccgaaatatccgagtttacaacgaagtaccttgagcttcctcaacctcgcaacgtttgggcaattgcggatgcgccgatggccgaagccatcaaatggcctatcgaggagatggcgaatcccaacccgcggactggctctctgctcgaccccgattgcgttgccattgcagattccttggatgaattggccgaaaagacgggtctgccagccgatgaattgaagaagacgatcgaagcatacaacgggtacgttgaatcgggcgtcgatgaggaattcggtcggaaactgctccccgccaaaatcgagacaggcccgttctatgcggcgcgtgcaagcctcattcgccatacggggcgtaacggcgctcgggtgaacagcaaatcgcaggttatcgatggtaccgcacgggtggactccaaggttgtttcatgcaacgacgaacccgttattccccacctgtacgcctgtggcgaatgcgggaactcccttggctatcgtcgcacgcacaacagcctcggccattatgctacggcggcaatgatcgctggagaaaacgttgctcaagaggaacccctgcaatagcggattcgattataggtttcggcgggcgggtgctgctcccgcccgttttccgattgtttacgaataacgaggttgaatatgaagagaaaactagccattgttcttgtagcttgtgcgcttacgtgcggcgtcgtgggaggatgcgcgccttccgatgcgggcgagggtggcaaggcgggccaagccgagggggcagagcaagcgggtacggcggtccctgagaagaaggtggaggtaaaagaggttgtcaccgatgagtgcatctcgtgccaccccatggatgaggttgccgccgcatcgggtgattacgttgcggaatccggggaagtggcaaatccccatcggaccgtcgatgaagatgctcccaatccacatgaggcgacaggtaacgaaaaagtcatcgattgtgggaagtgccatacggcgcacgagagcgataccccttcagccgatgacgtgaagcttcccgaaaacgtgaactattgctacacgaaatgccatcatcaaaggacgttcgaagactgctccgattgccataacgacaagtagcatcgtgttgaagcatgttgggcgagccggcaactgcgtttgtcgggtggcggctcgctcgtattgaaagcatttacggcaaccagaagaagcatgtcggtaaacgaggcagcgcttcatttggcggtctggaggttgatcggttatgcagccgatcgatccctggaaaaccccacatctggtttcgtttgcctgattgttaacaaaatctagtagatcgcataaatatgctgtgatagtatgtcttctgtcataattgatactaaaaatatagcaaaaggagctcactatggcgcaaacgatcaagcagcaggtgtccggcatcgatatcaccatcgcgtatgcgaacgagggcgatgcgcctgtatccgaaaaagaaatcaacgcttacatcgatcgtgcgcgcgagctctatcctgccgatacgcttgaatggcttaagctggaagtcgatggcgaagacgtcggcatcagctacgggcttgcgcctgtgccgttcgatcgcatccgtcgaatcaccggttacctggtgggaacgatggatcgctggaacaatgcgaagagttccgaagagcatgatcgcgtgaagcacggaaccgatcgcgccgaggcggcgttcgcttgctcgaacgggtgctagcgagtttatggcatatattgtgagcaggggccgcttcgttgcggcccctgctgcgtcaaccaatcgagtcgtggtcgtgcccgttgatcgcagatgtttttcaggaagtagcttgttcgcagcatttctgcacggcagtacggaacgcgtcggacgtgcgcgtggctccggctaccgtatcgacggcgggcgtctgccgttcgataacctcgggtatgagcgtttcttccattgcagcaacgccgacataggtcgtttcaagttcgttttcctgtgtgatctcggcaatctttccgcccgagatggttacgtttaccgtgatgtcgctgaacatgccgaactgggtatcggagtaggtgccgtctttcagctcgctttcgggcatcgtccaggtggtatcgggaaccgaagcgctcgtgtctccttcggatgagacggagccggatttgccgtctccgatgtattcggcggcgaactttgaagcaaatctgccggaattgatgttgttcgcattggttccgccaggtacattgatggtgtagatgttgggccagaggtcggccgaatcgacgcctgccgagtagaggccgggtacggccttcccgtttttatcgacaacttccattttgcggttagtgcggatacctccgaacgtgaccatgcaggattggggcatgtagcagaagtagaacggaggattatcgagcttctgcatgtattcgccgggcttaccgaagtaagcgtcgtggcccgaatcgcacatctcgttgtaggtgttaatggattcgattacggtatcgtaatcgagctcaagagcatcgcaggcttttttggcgagctcttcgagcgtgtcggcgctaaagaaatcgttgtaggggttttcggcaatgcgttcttcaagctctgcttgcgtcgcctcccaatcgatacggggagcgatcatgccgtcgtaggcatctttgaacgttttcgaatcgtagatcgagtacagcttatggtgcatgagcgaaggaatcatgtcggccatccagttctcaatgccagccgactcggcgcagaagcgctcaccatcttcgtttatccacatcgaacacgcgttatgtcctgcaacgaccagcccgtcgccgcgtccgtacgttccgtactcgcctccgggcgcacctgaaaccgtcagctgcatgagtcccgacatgcgtgggatgttgcttgcgccgcccgcctccatggccatgcgaacgccgtccccgtcgtatccgtacaggaatcgtttgacgtttgaggtatcggaaaatcctccctcttgcaggtactcgtcgttgttggcgaatcctccggtggcgagcacgaccgctttggcgttgatttgcacgtaatctccgttgagcttgcgggcgtatacgcctgtcaccgtgccatcgttctcctgaatcaaatcggttgccggacagttcatgagaaactcgacgccgaggtctttggcagttgcggtcatggcgggggagaaatcgtcatgtgcgcggttttcgccgaaccagtggaacgtttcgaacatgccgccgtgatagtcgtcgacgacgccggtgaagttgaccccgcagtctttgagccagctgatgttttcgcccgatgcttcgatgaggtcgagccacttcaatccgtttgcgcgattatgggagtactccatttccgttgaaatcacctcggcgggctcgatggatatgcccgcctcctgctgaagcttcgagttgactgcaaacaccccttcggtgccgatgccgcctcccccggttccgccatgcttttcgagcacgacaactccaaggccttgctgtgccgcttcgactgcagccgaaaggcctgaattgcccgcgccgcaaacgcaaacatcgcaggtgtatgttgcaacggcgttccgggttgcgccgctcttcttcccttcgccctcttcgtcattgtcggttttgccttgcggtgagtcgttgcttgccggggtggaggcgcaacctgccaatcctgctcctgcggcagcaatgccggccatgcctgcaattccgagaaagttccttctagtgagcttcatcccattctccttcgctcgattgtttcgaccgtccgatcgtcgtaaacgttcggtggggttgattctgcgatctccaggatgaaggcgcaattacccgatgaaggtagaattctttgcatctcttgccgtaattacccgttatgggtaagggtggacgaagcgaaagaggggtattatcaaccaatcggctttgggcttgctccttatgctgagaggaccgatgcgtttaccagtgggagggatggcgcattatgggaaaccaagagggccgtgcagtgggcggggggcggcgcagcgcgcattcgtcactgggccatgaaggcgtcggtattgacgatacgacgatttacagcaccgagcgggcggcgggcatcctgctcgctgtggtgggcatgacgttgcaatgggcttcgcttcattccattacatttttcgatacggtggcgcgcacgggattatcctcggggttcagcagcgcttgggtggtcaactcggtttgcacgttcggggtgtttctggcgattttccttgcttcgaagcgggtaccctctcttctgtcgaggcgcctttcggttcctttgatgtcgacatgccttgtcgtgggcatggcgtgtcttgtggccggtagctttttcatcgcttccgacgctttggtttacgccggaaacgccctcatagcatgcggcacaacgcccttgatcatcatttggggagaaatgtacggctttctcaatccgaagggcgagcagcttttcgtcacgcttgttgcggtggtgctttcggttgtggtttatctggttgagattcatctgccgtcctatctggcggttgcagtgttcgtcgttttgccgttcggatcgctcttcgctcttgtgagagcgcggactttgctcaaaggggcgtcgagcgcatggggaactaagacgaaatcgacgatggagaaatcgccggcattgtttttcgtgtgcattgtcgtgttttctataccgtataactatttgcggggaggcggtagcctgcaagcggttttgggcagtgtgaatgaatggtcgaacgtgcttgctgttgcgatcgttatgatggtgatggttgcccttgcggaatacggagccgaacgcaaggggttgctgcttgttccgagcttcgtgctgttctttctcagtgcggcgatggttacgcatttgtttttcggtaacgtgtcgccgcttacggttccaagctttctgtacgcgggttactatctcttcctggcgatggttcatttggcgctcggtcctttggttgcgacaaccgatgccaacccggcacgactgttctcaagcgccatgctcgcaaacgttgggggattgctgctcggatctcttctgggggtcctcgagctctttgtgggcgaacagacggctgctgtggtggtcatgatagtcacctacgtcattttctttgctggttgcatgctgctgtacaatcgctcctacagtatttttcgggtcaatttttacgatgagagcaagtattcgtttgaataccttgtcccgattggcccgctcgaacagctttccagggatggatcaggtgggtcggttgccgatgacgccgctcgctcgttgcttgaggccatcacggcgcagtgcgatgcagcgcaagagctttacggactcagttcgcgcgaacacgaggtgctgatcgctcttacgcgaggaaagacgatcgcatcgattgccgaagacctgtatgtatcggagaatacagtgaaagcgcacaccaaggcgatttaccgaaagctcgaagtgcatacccgggaagagcttttgagccgcgtgcaagatcttccggaagacaggaaattggaataaagactgttttcggtagggtttcgccaccctgagtcccatgctgttctcaagacgttaccgtcttgcgtccatggctccctgtcgaaaacctataatcatcttcatggaaaaagacaataagaacctacatgctgccgaatcgatcttcgagcccgaagtgcacaagcatcatcgtcggcgtaaaaaactcctcgagttcacgcattcgtccacacgggcgacgatgatcatgctcggtgctgcagtgctcgcgctcatcatcgaaaacactccgctgcttccgaacttcagcgaattctggaacacgttttacatcggcatatccatcgggtcgttcgatccccatatctcggtcggccatttcatcaacgatttcctcatggcgctgttcttcctggtggtcggtctcgaaatcaaatacgagttcacggcaggggagctcaccaaccctcgcaaggcgctgctgcctatcatcgccgcagcgggaggtgcggttcttcccgctctcgtgtacctcgccttcaacgcggggagcgggttcgagcacggctggggcgttcccatggcgaacgacatcgcgttctgtttgggtattctggctttgctcggcagcagggtgcccgccggtctgcgagcttttctctcgacgctcaccatcgtcgacgatatgattgccattctggtcatcgctatcttctatacagcaaacctcaacgtgatgtggcttgcggcgggccttgcgctgtttgccgtgctgatcgtgctcaatcgcatgcacatttacggacttgcgccgtatctgatcattgggttggcgctgtgggtgtgcatcctgctttcgggcgttcacgctacggttgcgggcgtgctcgtcgcgttgacgatcccggcgaaatcgcaagtacggcttggacgggtgagcaactggtttgaaacgaaggcccaaaacgccgacgagcgctacgatccgggtcaggctgacattgcgcaaaaggaatatctggttgagatcaggcagatcggccgcgtgtcccgtatgaccatcccgccgatcacccagctcgactatctgctgcatacgcccgtgtacttcgtgattctgccgctgttcgcattcgcaaacgcaggagtgctgctgacgggcaccgatcttggagcgctcatcatgagcccggtcacgatcggggtgttcttcggtttgcttgtgggcaaaccggtcggcatcttccttgccacatggcttaccgtcaaattgaaaatcagcgatttgcccgagggcgtgtgctggggccacatcctcggcgtttcggtcttgggcggtgtcggcttcaccatggccatcttcgtcaccaaccttgcattcgccgatccgacgacgatcgcttcggctaaagtggcgattctcgcggcttcgttggttgctgggctcatcgggttcttcatcctgcgccacgaggccctgtgcgccgattgcggcgacgaagacgattacgaagacgaggtggccgttgcgcagtaaccgcgtcctacttgacggttgcctttgccggttcgggaagctcggcggtgcaatgggggcagcgggttgcgccttcggcaacttcttcgaggcagtacgggcatttgggagcctctttttcttccttatgcttgcccttcgccgaaagatccttcgccttgttgagcgcttttacgatcaggaacaccacgaacgcgatgatgagaaactggatgacggcgttgatgaagttgccgtaggcgatggccgattctcccgcgccgagcggtatgatcagtttcatgttggagaagtcgaggccacccgtcaaacccgagacgataggcatgatgagatccgatacgaccgaattgacgatggccgtgaacgcggcgccgatgacgacggcgacggcgagatccatgacgttgccccggttgatgaactctttgaactcctcgagaaacttcttcatcggtttcctttcgcatcggtttgcctgaggcggccgtgcagccgatacggcaaagatcgccttggttcgatccgtacgaccgcagacggccggcgaagcacagtataggatatgcaatggtagaataaagaaacgtttagcgaaccgatacttttacttgatacaggtcgaatcagtgtgaatgcggtgatccagtgacgaaaatctatacctatacgcaaccggtcgatgccgatatcgtcgatgcgttctgcgtgctccaaaaaggctttaccgatcagttcgtgttctacgacaaaacgcgtaaggcgcgcttcatggggctcgggcgctgcatcgcgctgtcgagcttgcgggatgtagagtacgtcgtgcagggcgaaaccgggaagccgccgatcctgttctcattcaaccgcttcgatgccgagaacccgagtcccgccgacgagctgttcgcgtcgtttccgcgcctttcgctcatgcttcccgaggtggtgctcatcgaggatgaaaccggaaagtatttgcagatcaacagtttgggcccggtgtatgcgggtcgcgtcgcccgcttttcccgccatatccgggaagcgaagccgcgcacgcgcgtgacgattcccttcgagctcgaacgggattcgcgcgaagcgtgggacgaggcggttgccgcaggcctttcggccatcgagggcggccgcgtggacaaagtggtgctttcgcggcggcagaagcttgtggccgcgcatccgttttcctcgaaagacctgctcgtgaacctcatcgacggtcccgcgcgcgggacggtgctgctctatcgctacggcgacgtgttcttctgcggctgtacgcccgaactgctcgtgcgcaaaaacgatgccgcggttgagagcatgtgcttggcgggcacgtgcgcggcggggaccgacgaagcacagcgcagccgattggcggaagagctgctgcatgaccagaagaatctgcaggagcatgcctacgtagtcgatttcatccgcgaagtgttcaggcgcaattgccatgatgtcgagattcccgaccatccgggaatccttccgctccagcacgtccagcacctttatacccccgcatcggcccaagtgcttgaggggaaaacgctcatgggcctcatgtccgagctgcatccgacacccgcgctttcgggtacacccgtcggcgaggcgctcatgctcatccgccaggtcgaagcgtacaaccgcggcttcttcggaggcgctgcgggctatgtggacggcgatggcaacggcgagttcgccgttgcgctgcgcaccggtgtgttcgatggcgagatcggatggctgtatgcgggatgcggcattgttgacggcagcgttgctgccgatgagtacgatgagatagacatgaagctcaagaccattctgagcgcgttcgatggagagtgcgatgcctgacaggttcgaaaccccgcaggcttcggcgctgtttctttccgcgttcttcgacgagctcattgcgtgcggcgtccgcgacgtggtggtaagccccggttcgcggtcgacgccgctttccatggtggcccatgcaagcagcatgagcctctacgttgacgttgacgaacggggtgcggggtttttcgccctcgggctggccaaggcgacgggacgcccggtctgcctcatctgcacgtcggggacggccgttgcgaattactatccggcggtgctcgaagcggaaacgtcgcgcgtgccccttatcgtgctcacgggcgatcgtccgccgcgcctgcaaaacctcggagcaccgcagacgtgcgatcagcttaaggcgtacggcgatcacgtgcgccatttccagcagatgccgattcccggggcgaatcctcaggagatcgcgtttgcgcgccagatggcaaagacggcattcatcgcttctgtcgggactcccgcggctgccggggaggacggctcgccgttttacggatgcatcggctctgcggggcccgtgcatttcaacttccccttcgacgagccgctcaaacccgatctgtccgttcggggcttgttcgagatcgggcgcgggccgcttgcgcccgacgagccgataatcgcggcgtctccagagctttccgagcggcaggcgcacgctgttcgcgcggcgatgggaggcaggcgaaccatcgcgcttgtcggcgagggcacctgcttcaatgcgggcgacgtcgaggatctgatcgcgtgggcccaccgcttctcgatccctctcttggccgatccgctgagcggattgcgctgggtggacgacgagctggtgatcgatgcgtacgacagcgtgttcgcgaacggagagcagccgagcatcgactgcgtgatacgtttcggccgctatcccgtgtcgaaagcgtgcttcgcttcgatctgcgctcgcagcgcttcggccgaagccgatcgaggcaatgcggcggacggcctgcggtccgagggggccgatggccgccccgtccagatcgtggtcgatgcggtcgaaacgcgcgatttcaacgtggcgaccgatctgttcgtacgttgcgcgccgatggcgttcgtccgcgcgctttgcggcgatgacgaggggtgcagcggcgaagcgcaggcggcatatgccgaggaatggatcgcgcgcaatcgcgccgcctgcgcccgcatcgggcggatcgccgatgcgggcgatgatgctgaggcggcttacgtggcgaaagcgctcgaactcgctcccgagggatcgctggtgttcgctgcgaactccatgtccgtccgcctgatcgatgccgtgtatcgctcgtcgggaaagcgcctctcccttctgtgcaatcgcggccttaacggcatcgacggaacggtgtcatcggcgcttggcgccgcgcaggcgtaccgccagactacgttcgtaaccggcgatcttacggcgcttcacgatctcaacgccctttcgatgcagcgcgagcttaccgttcatcacggcggcgatgcggcttcgagcatcgtgatagtgctgctcgacaacagcggaggcggcattttcgaaacgcttccgcaaaagtcggaggatgcgtatttcgagcgggtgttcctcacgccgcagcgcgtcgatttcgaacaggcggcgcgggcgttcggcgtgccgttcgaaagggtggaaaccgttcgtgggttcgaggaagcgtatcgggccgcgcttggcgtccccgggatcagcatgatcgagattcccttcgccatcgaaggcacggctgagcggttcgggcggtatcgctagatggcgggcgcgagagaaagctggttcgagcaccttggggtccgctatcatgttgccgagtggggcgatccggatgctcttcccgtcgtgctgcttcacggtttcgcgcagagcgcggaatcgtgggccgaaatagccccgcggttagccgaagcccgattcgtcgttgctcccgagctcgttgggcatgggaaaagcgacaagcccgacaatccttcggtttacgaaatggacgcagtgaccgatatgctttccgcgttcttgagcgagcggttcagccgaaaggcggcgctggtcggctactcgatgggcggacgcattgcgcttgccctggcgtgcggcgagccgagcaagatatcgtctctcgttctcgaaagcgcggggctcgggccgaagacagggcagcagcatgcggccatgcggcatcgcgatgccgcgctgatcgagcagcttctctcaagcgatatcgaagcgttcatggacgaatggcaaaagcagccgattttcgaatcgcagaagaagctttcttcggaggtgcgcgatcgaatccgccgcgaacgcgtggcgaacgatccgagggcgctcgcctacacggtgcgcggtacggggcagcacagcatgatcgactactcgacgcacatcaagcacctgcccatgccgattttgtacattgcggggattctcgatagaaagtacctcaaaatagcggaaaatcttgcttacgaagaaaatgtatcctgcgtgctgctcaacacggggcacaacacccatcttgaagatcccgaaacgttcgccaggcaggtgggcggatttttggacaggcaagcgaagcgcgcaggtcgctaagggctaaaacgcatcggccgcggggtcggcatgcgcaagagggaaggatggaaatggtcgatatcgcgtggcagaagggcaaatcctaccaggagatcgtctacgagacgttcgacggcatcgcgaagatctcgatcaacaggcccgaacgccgcaacgcgttcacgccgctcaccgtcaacgagctctacgacgctttcacggtggctcgcgaagatgctgaaatcggtgtcataatccttaccggcgctaatcacggcggccgtcacgaagatgaggcattctgctcgggcggcgatcagaagattcgcggcaacggcggctacgtcggcgaagacaacatcccgcgtctgaacgttctcgatctgcagaggctgatccgcatcgtccccaagccggttatcgccatggtgaatggatacgccatcgggggcggtcacgtgctccatatcctgtgcgatttgtccatcgcggcggaaacggcgaagttcgggcagacgggcccgaaggtcggcagtttcgacgcgggatacggtgcggggtatctggctgccatcgtgggccagaagaaggcacgcgaaatctggtatctctgccgtcagtacacggccgccgaggcgcttgaaatgggcctggtgaacaaggtcgtgccgttcgaagagctcgaggccgaaaccgtgagttgggcgcgcgaaatgatgcaattctcaccgactgcgctgaggtttctcaaggcatcgttcaatgccgcaaccgatggtttagccgggctccagcaattcgcaggagacgcaacccttctgtactatacaaccgatgaggcaaaagaggggcgcgacgctttcaaggaaaagcgccagcccgattttgatcagttccccaagttcccgtaggatcggaaataccgtaccgagcctgcggaagcgcgtgtctgtgaagcgaggtcggaaccaaacgcgtgatacagcagttcgaacagacgatgcgaaggcggccgaacgacgtattcttccaatacgtcgacggcgcaggtgatcgtcgcgcgtttacgtacgaggaaaccaaattttcggctgcgggcctggctcttcgtttacgtgataagggcgtttcccgagggtcgggcatcgccgtcgacatgcccaattgccccgcgttcgtgttcatggcgctcgctgcagcctacggcgggtttacgctcgttgcgctcaaccaccgtctgaccgaagacgagaaaacctcccgccttgccgatctgcgcatgtcgagcggtttcgaggtgtcccgcgtattcaccgagcacgatgtcgctcggttgctcgatggcgttcccggcggttacgacgtggcgtatcggatcgaacacgccatgggaaccgccgccggcgcgcaggctgtcgccgacgtaagggcgcgtgaggaactgcaccattcggggcaggcatcgcaggttccgagcgcgcagggtcagggcctgttcacgcgtctgctcggaaagggcggcaagcgaggggatcagggcggtaggccccaaagggcaggcgggcgcacagcgggcggccaagctggggaaatcgattcgcggtccattgtgaattttgccgaacgggcgcgcgcgggattcgacgagagcgcatgcgcccttatcatgttcacgagcggcacgacgggccgcccgaaagccgtgccgcttgcgtgggggaatctcatggggtcgtccgaatcgtcgaatgcggtgctcaaccgccatggcgagggcttgtggcaggcggcgcttccgatgtttcacatcgggggatttcaaatcctggtacgcagcgtgctcaacgaaactccttttatcctgtaccgtcggttcgatgcaaagcgaatgcttgccgacgtgcgtgaatgcggagcgacgcacgcctcggtggtcgataagatgctgcaagatctgcttgcggccgatgacggtgaaacgcttgcgcggtatcggtgcctgcttttgggcggtgccgcgccgaaccccaaaactcttggccgggcggttgccgccgaggcgcgcgtatacgccagctacggcatgaccgaaacgtcgagccagatcgcctccgcacaggtgacctcttcgacccccggatcgctcaggcttcttcccggctacgaagcccgtgtggtcaatcccgacgaatcgggtgcggggcagcttgccgtgcgcgggccgggcgtctttggcggctatctcaacgcgcgaacgcccacgacggcggacgggttcttcctcacgggcgataccgccacgtgcgaacggggcaggctcaccgtgttcgagcgttcgggcgatatgttcgtatcggggggagaaaacgtgtatcccgccgaaatcgagcggaagatcatgagcgtgccgcaggtgagcgatgccttcgtgttcggggccgaggatcccacctgggggcgcaggcccatcgcatttgcacaacgcgatgggagcgccgcgcttccgggcgggggcgcggcgtcgcctcgcgcgttcgcgcaagtcgttcgggcgagtttggagcggcgcctgtcgaaactctaccagccgaaacgcatattcgtactcgacgagttccctcgcacgggtgtggggaagatcgatcgggttgcgctgcagcgcgcctatgacgagcggctcgaggtcaagcgcgtgacgctttatcgtatcgaccagaagcttgcgactccatttgccacggcgaagaccacgatgcgcacgcgagaatcgatactggtggaggttgaggactggcagggaaggacgggtctcggcgaatgcgttgcttttgcgaccgattggtaccttcccgaaacgctttccgacgatctgcgcgttctcgaggatcatctcatccccctcgttctctcgcaggtgtatttgcatccgagcgaagtgtcggagtcgtttgccgaatgcgctgctgcgaaggcgtatcctcttgcccgaggggcgatcgagcctgcgttgtgggatctgtacggcaaggttgtcggcaagccgctctggcagctcatcggcggcgcgcgcgcaaagcgcgatgccgatgcggcggtttcggctccggcgctccaaacgcttgcgacggccgaggttcgcgcgggcgttgtgcttggagtgatgtcggttgacgagacgctcgccgaggttgggcgctacgtcgaagcgggatacgatcgcgtgaagctcaagatcaagccaggtgacgactatccgcgcgtgcgtgccgtgcgcgtcgcatatcctcatctcaccatcatgctcgatgcgaaccaaagctataccgagcgggatttgcctgcgctcaaatcgctcgataacttgggaatacgctgtatcgaagagccgcttgacccccatcgggtgccgagggtcggtccgaccgatctgttcgctcggttggcccgtttgcagcgagagctttcgatgaaagtgtgccttgacgagtcggtggtcaccgaagacgatctcgcccgagcgctcgagcaccctgagcttgcatgctatgccgtaaagatcggcaagtttggcggcgtgcagcctgcgcttgatttttaccgggaggcaatggctcgcggcatcgagctttggatggccggcatgtacgagaccggcgtttcgaagcggctgcatgcttcgttcgagacgctgctcggcatcaacatccctggcgacatcagtgaaacggcgcgctatttcgagcgcgatatcaccgaccccccgtttgcggttgagcggggatcggtcgttctgaaccagaagggacatgagatgggtcttggctgcgacctcgacagagaagctctttcgcgcgttctcgtggaacgctgggattaccaatagcggcatcctttccgattcattacaacgtgtcgcaaccccattggcttttatgcggtttcgagtattatggatgagccaaccatacaagacggggtgatacaacatgagcgaaccatcagcgtctcaggccgtgcaagccgaaggttcatcgagcggaggcctcgggatctttcgtttggttaccacggttatcacgttgatcgtcggcggcggcgttttcacgctggcgggggatcaggctgcgggcggtgcaagcggcgcggccgttttgacggcgtggggcatttcggcggtgggcgtgctgtgccttgttatgacgtttttcgccctttcccgcgtgaaacccaaactcaaaggcggcatctacagctatgcgaatgccggattcggcgattttctcgggttcaacagcgcatggggctattggatcagcgcgcttttgtgtacggtgagcttctcggcgcttttgttcggggctctttcctacttcttcccgatattcggcggcgggacgaatctgccatcgattatcggcgctagcattctcatctggttttacgtattcctcgtatcgcgcggcgtcaaggaagccacgggcgtcaacgccgttatcaccatttcgaaattcgtgccgatcttcgtggccattacggccatcatctttctgcagaagttcgatccggcgatattcatggagaacttcacgacgggtgccgtgccgggcatgccgttcttcgatcaggtgagcagcaccatgatggtgaccatctgggtgttcgtcggcatcgagggagccgttgccatttccggtcgcgcgaagaaagagcgcgatgtgggcaaggctaccctcatagcgttcgtgtgcgtgctttcgatctatctcatggtgagcgtgctttcaatgggcgtcatgccgatgtccgagttggcccagctcgagaaccctgcgcttgcgggcgtcatggagcatgcggtagggcagtggggagccatccttatcaacggcggcgtggtgctctccctcgtgggcgcgatgctcggctatacggtgctgtcgagcgaatcgccgttcgaggcggccgaacagggcgtgttcatcaaggcgttcgcgaagacgaacaaaaagggcgctccgatcgtcacgttggtggttacgaacatcatcgtcgaagtcttctacgtcatcatgctgttttccgatagcacgtaccagttcttctatacgctttcggcaggcatgatccttttgccgtatctgctctcggctgcgtacttcgccaagatcacattcactgaaccgggtgcgtttgcaggcaagctcggcggcagcatggttctctggcgcatcttcggcgttttcggcgtgctttacagcttcttccttgcctgggcgtcgggcgcggttgggctgacgctcatgtcgcttttgtacgcgccgggcatccttatgtacatcaaggggaaaaaggagcgcggagagccgtatctcaaaagcgcggttgaccgggtggtggttgcgatcatccttgtcgccgcccttgtctcgatcatcttgctggtaacgggaacggtggttttgtagctcgcaggaagatgcaaaggcgctacaatagtcagggtattcatgggaaaccgcacagccggcttcctgttttatagctgacgatgggctgtctatgcattcatcaaacaaggtagcgagcaaatctgacggcagagaagcgaggcttcggccgagcgtgctcaccataggtctggctgctttgttttcgacgcttttgattttttcgggggctatgacttcgtttctcgcccatgagggcgtgagcgatttcataagtttgtatgcgcgatcggcgctggtttcggtgctggtggtcgcaattctggtcgtcggtgcgtcgcttgcgggcaagaaccttccgatcaaagtgctttcaggggtcggtggagttatccacctcgttgcttgtgcgtttttctgctatctcgttcttgtgggagaccagggcgcggccttcacgtgtttcggcggagctgcaagcggaatcggctgcgggctcttgtgcctgacgtggggcaagctgttcagtcgcttctcgttgagcggggcattgctcaacgttgcggttgcgagctgctcggctgcgatcgtttacgcgtgcatcatgatcgccccgaccttggcgagcgtcggcgttttcatggtgtgcgcagctgtggccgcagtaactccctcgctgttcggcggtgggagtgacggggctgccgaagcgagggcgcgcggacagaggggatcgtcgttgcctgcctttttcggagtggttgccgaacccgctttcgggctgctcgtgttcgcgttcatcatgggtttgacctgctacacctatatggaatggtactctgattatctgttggcttcgtttttcgcctcctccattttggttgtcctggcttttctgcgtttgaagaagcccattgttcgtccgctgtaccgcaacgtcattccgctgttggcgatcatcatgcttgccgtttcgagtatgagcaaggcggttgcgggcggttctgctgcagagatgttctgcatgtttctgctgtactcgttcgctgcgacgttgaccatcgcgacgctgtgcgcgattgcccatgcatcggagttttcgtcggacttcatctactcgatcgcgttggttctgttcgcggcggcatcccttatcgggttgagcctttccgagatcctctctggtgagacgatcggcattgcggtgacggtggttaccacggtatacgcagcggttatgctggtcgctcgcagcatgcattctggcgatgattccgccgctgcggaaaacgggctcgacgagggcggctccgggacgatgcgggatcgatgcgattcgctttcgagcgaacacgcgcttaccgaacgggaaagcgagatccttgtgcttctcgcgcaggggcatgcgagtgctgagctttccgagatgctgtttatctctccgaatactgttcgcacgcatatccataacatgtaccgcaagcttggggtcgcctctcgcgaggagctctttcagcttatccgctctcggtagcacgggggatcctaaccataccgtttatcaggtataacgcagtagtgaatcacctcgttgatatgatagcgggataaataaacgcctctacgtattgtctaaacatccctcgcgtccgcacaatgcaaccgcttcgaagcgaagccgcatgcatgatgaaacaaggagggaaagcatggacgtatcacgacgcagttttttaaagggtgttgcaggagcgggtcttgtgggcgcgacggctggtttgcttgggtgctccccgcaggaaacgaagagcgcgacggctcctgagccgaccgcaagcgccgaggcggcaacggtgccgaagggctacgtttgcagcgaggattggctcggcgcggctcccgtcatcgatgaggcggacattgcggaaacgaggagcttcgacgttgtcgtcatcggcggcgggcatgcagggacgcaggctgccttggctgccgcccagcttggagcgagcgtcgccgtcatcgagaagcataaggatggcgagatcgtctatcgcggcgacgatatatgctcgtacaactccaagcttttggaaagctggggattcggcccgtacaacctcgaagacatcgtgaacgaatacatacgtcgcgcggcgggcaggtgcaacagcgaagtcatccgctcgttcgtatacaattcgggcgagatgatggacaaccttgtttccatcgttcccgaaacgtctaccgtattcgattacgagggcaagcagtgcacggtgcagatcgcctacgagaagccggatggagctgattatcctatcctgaacggcgggctttaccagtgggcttcgaccgttcaaacgctgaattcgatgaacgaggcgcctgtcggaaaaaacgggctcaccggcattacgcgcttggccgagctcgaggtttactcgcgcgaagcggcggaggatctcggcgcggtgtggtactgcgatgaaagcgcgctggtgtgcacgcaggctgccgacgggtcggtgaccggcgtcatcacgcaggacggggatcgcaagaacatcaagtacgaggcggccaagggcgtcattctcgcgacaggcgatttcggcgccaacaccgacatggtctaccagctgtgcgacgagtgcggcgaatacgctgagcgccacggcgtggatcgtgaaatgctgactggcatgaccgattgcgatggttccggacacaagatcggttgctgggcgggcggcgctatcgaggggcatccgcgcccggttgcgggcagcgctccggtcatcggattcgggccgtggggttcgactccctgcctttggatgaactgccagggccggcgcttcatgaacgaggaatgcagcgcgctacttctcgcgcaatccattcgccagccgatcgcgcaggaaggcatgatgggcaacttcgccgtgatggataagaagtacatgcagtacgtgcagaagtgcggcctcgatcacggatcgccgaactggggattcgaccagggtatggaggcgttcgagaaggcgatgcaggcaactcctgaaaacggcagcatcaaagtgaccacgatcgtcatcgcgagctacagcgaagagcagaacaagatgctcacctacgacgtgttcgtgggcgatacgatggaagaggccatgaagaactccggcctttcgggcgacgcgctcgcaacggcgctcgagacggtcgagcagtacaacgagctgtgcgcttcgggaaccgatacgcagttcggcaagagctccgacatgctcattcccatcgacgaggctccgttctacgttgccgttcaagccacgtctgccctgtacggtcctgggttgaacacgcttgcgggcttgtgcgtcaacggcaactaccaggtgctcaccatggataagacggcggtcatccctggcttgtatgcggtcggcaacacgatgggcgagcgctacggcaactcgtacagctgcccgtcggcgggcaacaacatgggcaacgctcttacgagcgggcgcgtagctggaaagcatgcggcttcggcgtaagcgctgcctgggataattcgggcaaacggaaagcgggcggatcgtttgatccgcccgctggcgttgggatgcttctgggttctattgctcgtggcgacgtgcgctgagggcgatggctccgacggcgacgagggcggcgcctgcgagggcgcaggcgccgggcaggagggagtcgctggtgttggcgagtttgccgcttttgctgtcggggctcgcaggatcgggcacaggcgtcggatcggggtcgggatcggggtcgggatcaggatcgggacctggagcttcgggcgtggtcatgtgcgtgaaaacgtagtgcgtcatgttgcgcagctcgtcttcgtcggtgttcgcgatggtgccggcgtcgaagtgcttcgcgagatcgcccgtgtagcggaagtcgagcgcgacgatatggtgcaggttctggggctggtgcgtaaccgaatgcgtgccgaaatcagacacgtacgcgagcgccgtgtcggcaccgccgggcgtctgcgaaagcaggcgggcgccctggaattcgacgtcttcgaacttcggggtggcgcttacggtgtgggcggcggttgtttccccgatattccagatgtacatgaacggatactgggcgtgcgctccgcttatcgttccgagcgtcgagaggatcgtgaggaagtcggtcgatgtggtgaagctcgttcccgcaacggcgttgagggcgttgatgagccactgcttggtcgaatcggcggtgatggtctgcccgttaacgggcgcgaagagcccgagcgctttaaccaggttggcgtcgacgctcgcggagaagtcgatcgcgtacggcgcgggcagcgtctgggcgagcagtgcgttgatcgcttcgccgagcgaagcggcggcgggctgtccgaacgtgttcacaagatcgtcgttgagcgcgtcgagcaggtcggcgcgggtagcctgcagcatctcatcggtgacgggagtcgcaggatcgctgtaggcgagcacggtggtgatcaggtagtcgatcagctggtcggggttcatggcgagcacgcgatcgagcgagagctcttgcagcgactgcacgatgagcggcttgtaccccgcccattcctgctcggtcatgagggggtagcccgagttgtccagatcggtggttgccatccatcccgcaacggcgagaagatcgtccatgctcgtgatgtattgtacgggcacgtcggtgcggccgaatgcatcgtagaggttgatgttcggcccgatagtggccgccatgctgccgaacagatcgtaggccgtcgaggcgaagagcttgtcggtatcgtagttccacagcatggttgcgatggagagggcgagctcgcgttcgtcggcgttgagctcgtcgtagtcggataggtcgccgatgtgcacgggagagaactcgccgccggaaacggtcaggtcggtctccatggcaacgggcttgtccttggagtcttggctggttgacgaaagagacagcgataggaagtggttgtcgagtccgctgcttacgagcgtggtccagttgctgggggagatgaccattccgctcgaatcgaaccagaggcgcgcttcttcctttgtagtttgaatccaggtgtcggatacgtctacgctgatgtagtcgtatccagacgtcgccatgtaattagcgaaggggacggcgaaaagatcggtgggaagcgaggtcaggctgttgccgtacaggtatacaaagcgaaccttcgggttgtttgcgaacaggttcgcgggtatctcggtcagccgattcccctcgatgtccaccgactcgaggttcggcaggtcggcaaaggcgtttccgtcgatggctgcaatgttgttgccgtagagaccgactctttcaagggaggggttgttttggaatgtatcggcttcgatggaggtcatcggggtgtaggcgattgtcagctcggtgatgttcgggaagaggcggaggtcgtcgagcgacccgattggctggtagaagaaataaaggctcgtcatggcttcgagatcggcttcggtccagggagccccgccgttcgtttcgccgtactcgtcgtagaacgcctgcgcgaagccagggtcgttgaacaggtcgtcgtagtctgcggcgaacgcgctcggcgcgaacgagcaggcaagcgcgatcgagatcaggattgaaaggagcgcttgctttgccgagcgggcgcgctctggtcgtgcggatgcgttcatggagtcccctaaccgtgtggtgacacatcccatctagtatagcgatttgattgtaatatattaccaaaattcggtaagtggataccataaaagggacgttcaatgttggcgcagggtctcttgagagttcgtgcggagacttgagcgggaagtcgttgcatggagcagcggttgcgcgcggcttgttgacggactccttccgtgcgcagggcatgcgcgttgtcggcaacaggttgaaaacccctttgcgccgatgcttccaatttctcgaagttgagcgataatcgatagctgcaacagtctgcccaatccgtcgccgcaggcgatgggcgaaggaggaatcgcaatgtttacgaacgtgatcgtcaggcgtccgagcaaatcgctggtggacggtattacttcagcacctgagctgggtaagcccgattacgagttggcgctcaaacagcacgacgactacattgccgcgctcaaggaatgcggcgttgaagtgacggtgttgcccgctctcgaggaatttcccgattcgtgcttcgtcgaggatacggccgtcatcacgcgtaagggcgccatcattgacaatccgggtgcaggcacgcgcaatggcgaggctaaggcgatggagccgactatccgcgagttcttcgacgacgaccatatcgcctacatcactgctcctggtacgcttgagggcggcgacgtcatgatggtgggagatcacttcttcgtcggtcgctccgcccgcacgaacgaagagggcatccgtcaatttatcgagatcctcgaaggctggggcctttcgggttccgaagttccgctcgagttcgtgctgcatctcaagacgggcgttaactacatcgaggacaacaacatgctcgtttcgggcgagttcatcgagaagcctgattttgcggaatacaacaagatagtcattcccgaagacgaggcgtatgccgccaactgcatctgggttaacggaaccgtcattgttcccgagggatatcccaccgtgctcgagaagattcaggaagcgggttataaaaccatcacggtcgatacctcggagtaccgtaaacttgatggtggtttgagctgcttgagcctgaggttctagcgctcgtaccctgcacggggtacaataggcgcgtacgcaacttggcgaatacagtatggcgagcgccccccggggggcgctcgttcgtttgcagggttgcgatcccgccccgcgtatgaagtgcgtggggacgaaaaccacccgctatgtagatgcgtgctgggtgcatggtctgagatccacggattgaccgcgtgtcttgatccgtttgcatcgtctgctcgtaggtggtttcgcgcgtaactctttcttgctgtgggtaaactgagtgctgaatgggcgatttttgccgaaatcaatcgatctgaaggccataggcaaccagtacagagaatatcggaggccccgcttcctcgttcctatcaaaagaccaggtcgcaaagctgaccagaaaaaccgcccggagtgatcctttgcaagcggctgccaaacgcgctcaaacttggctcgatcccttcagatcggttgatttcggcaaaaatcggagatttggtgcacaaataccatgctgccgtcatcaaacccgaatcgacatgccctgttcgggagtccagacgcccaggtcgccattagcgtttcgtgggactgcatcgattctggtttgatggcagagcgaaacggttgccagcgctttgctcgtcaagcacggcgtttcgccgccaaatcgctgtatctcttctggatattgcacgatgagcctgcaaggtgcccgataacctgatacaaaagataaggacaatcaaaaacgctgctattgcattgggtcggcataaggaaccgaccgcggcagtcttgaaaaccgaacctaaggagaccagctttaatgcccgttgcgctaagcctttttcttgtcctgttctttctgttgatgaacgcgttcttcgtcgttgcagaattcgctctcgttcgcgtgagaaaatcccaagtcgaaatggccgtcgacgagggaaggcgaggagcgaagaataccaagctcgttgccgacaacgtcaacgcgtacctttctgcttgccagctcggcatcacccttgcctctttggcgcttggctggttgggcgagcccgctgtatcggagctcatccatccgctgcttgcagccatcggattgcccgatgctgccatctcggccatcgccgttgccatcggcttcattatcatcaccgccctccatattgtggtaggcgagctcattcccaaatcgctcgcgattttcagcaccatgaagtacgcgcttttgacggcgacgcccctcgtgtggttttaccgcatcacgtacccggtcatgtggctgttcaacaccatcacgaacggcgtcatgaaactcgcaggtcacgatgttgccaacgagcacgaggtgtataccggtgaggagatcaagctgctcatcgatgagagcaccgaaagcggcctgatcgacgccgatcagaatacctatgttgataatattttcgaccttggcgacaaagacgccgaggcgatcatgaccccgcgcaccgagcttatctgcatcgaccttgaggacacgctcgaggaaaacgtcaagacgatgcagcagtacaagtacacgcgctatcccgtgatccgcggcaacaaggacgatatcgtcgggttcgtgcacatcaaagacctgtacagcttacctgcgggtacgacgatggacgatcttaagatccgcacgatccatgcggttcccgaaagcattccgatcgcgaagcttctgcagaccctgcaggaaaagcgcacgaagatcgccgtcgtggttgacgagcacggcggtacgtcgggcattgtgaccatgagcgacatcatgggccagatcgtcggcaagctcgatgacgaatacatgcacgacgataccgacgaggtgaagaagctcgccgacggtcactatctggtggacggctcgcttcctatcgacgagctttcggagctcatgggcttcgagcctgaagaggcgggagattgcgaaactgcaggcggcttgctgttcgacctgttcgggcagattcccgaggaaggcgacaaggtgtctgccgaagagggtgagacgaaggtcgatttcaccgtcaagaagatggatgttcgccgcatcgacaagatcgacatgatgatcgagcatgttgaaaaggaagaggggaaagaaggggagtagccgctgggttgcacccgactttcagagcaatggtttcggcggcgtcctttgggcgccgctttgacgtatggtcagccgatcttctcgccgatgaagcgttcggcgttgtgccagagcatgtcctcgagctcgtcatcggaaaagcggcatccgatgaatttttcgtattcgcctacagggtcccagagcggatagtccgatccgaacagaatgcgatcggtgccgtaaagcctgcaaagctctctggtgcgcttttgcccgacatagaggatcgaactcgatacgtcgagaaagcagcgctcctcgcggagaagctcgagggcgagatcgagtaccaggcacccgcccaaatgcgctgcattcacgatgaggcagggaaaggtgcgcaggatctttttgagtcgggccggatgagagcaggttcgctcccgatcgcccatgtgcatgatgatcgggagccgacggctttcggcaatttcgtagacggtcatgagccgcggatcgtcgatatcgacttcttgcatgtcggggtggagcttgatgcctttgaggccaagctctacggctcgctttatctccttttccggatcggcgtagtcttggtgcatggccatgaacccggtgaattcgggatgccgcgcgcattccgacgcgatgaatgagttgatgctttcgaccgaatgggcgctcgtggcaaccgagtgcacgacgaagttggtgatgggggagtttgccgttgcggcgaccaggccctcagaggtgccttcgccttctgtggacatgttgtagaagccggcaatggagcttaccgctcgcgttgcgatcttctcgggatagatgtgcgcgtgaatgtcgattacggtcatattcgtcaccttgccgtttttgcagctagcgcctgcaagctccgccttccagggctagccgttgacggctgatccgaggaagcgttccgcgttgtgccagagcatgtcctcgagctcgttatcggaaaaatctatactcgtgaacgcgttgtactccgaaacgggatcccacatggggaaatcggaaccgaataaaacgcgatcggtgccgtagagcttgcagagctctttggtgcggcgtttgccgagccagaacatcgaactcgacatatcgatgaagcagcgttcctcgccgaggagatcgtaggcaacttccggcatcgaccaacccccgaaatgcgcagcgtcaacaacaaggtcgggaaaagcgtgcagaacgttcttgagccgccgaggatgcgagaagtcgtggcgataatcgcccatatgaatgattatgggcaggcggccctgaatcatctcgtacaccctcataagacgggggtcgtcgaggttgacctcctgcgtgtcgggatggattttcatgcccttgaggccaagctctacggctcgctttatctccttttccggatcggcgtagtcttggtgcatggccatgaacccggtgaattcgggatgctgagcgcattccgatgcgatgaagtcgttgatgctttcgacagatcgcgcgttggttgctaccgagtgcacgacgaagttggtgatgggggagctttccatcgaggagagaagatgttccgatgtgccttttccgtacatggatgtgctgtagaaactgccgatagcgtcaaccgctttgcttgcgattttttcgggatagatgtgggcatggacgtcgatgacggtcattgcaggtacctcgtattcgaatgcgtatgcgcttttgctcgattcgattgtaatacagtgaatgtcgcatggggcagcttttggcggcttcacctcataatacgtacgggttggcatcggatttggcagagattctgaaaccttcggagtgtcaattccgcacattttgtgaaggaaaaaacacttcttgccagaaaaggtcgagcagagtattatatcttcttgccgcttttcctgttcttgatatatcgaatggatgcaagttggcaccatagtgcgggatggagcagtctggtagctcgccgggctcataacccggaggtcgttggttcaaatccagctcccgcgaccaaatgacatcaggtcgatcattttaaatggtcggcctgttttgttttcaaaacggcgtactttggacgtaacgcaacagaaagccgaccgaagaaagccttcggtcggccgcaagaacgctggccccgttagggggaaggggtcagcataatggtgatgcaacgaactggctgttgtgccgctcaaagcatctaggcagatgagggtagctaacgggagcgactattttccggccagatgcttgccgagcctgtagccgaaggtgaggctcctgcccatgttgatgccgggcataacggtaacgtaggtgtttgcgaacatgccgcccaccatggtgccgtttgcgtagagaccctcgatgggagtgtcttcctcgttcagaacgcgcatgtcgctgtcggttctgacgccgccaagcgtaacgagtagcatggaggtgtgcttgtcgcagtagaaaggcggctgtttcacggggtgcatgagctcggcgggtttgaagaagtcgtcgtcatggcccttctcgcagagctcgttgtagcgttcgacggatgccttcagcgtgtctgcgggtatatcgaagtcggctgcgagctcgtcaagcgtgtcgtagccaagaccctcggggcacatgaccatcgcaagatcttctgcggttgatacatggccgccaaccctgccggcaatgtgcggcattgcggtcggccacgtggaatcgtagatgttgaagctgtagccgccgtagcggatctgctgaacgccgcgctggccgaaggcagcctgctcgccgccgtagcgctcgcccttttgattgatgccgaggcaccatttgctcgcattgagggaaaagacggcctccttggcggcgtcgaagagctcgagtttttcgggatcgtccgcgtacaggtcgcgcacttcgtcggcggtctcaactttggcggtcgggccgcccgtggcgttcgaaaagatcatcggaggcagggggcttgtgtattccattgcgccgccagcttgcagaatcattgcatggccgtcgccggtgttgcctgggctcacgttgagaatctgcggggcggcaccggttgggcaccatgcttcgagcatttcttggttgccggcgaagtcgcccgttgccatgacgatgccctttgcgccgctgaacctgaggaagtccttggagccgttctgggcaatgacgcttgtaacgcgaccagaatcatccttttcgagctgcagtgcggtcacgccgtaacgaacgtcgaggcccttttccttgtatgcctcctccatgatgggcaggaaatcgataatggggtgggtatccgtgcggggaccgttttcgccgccgaggaacatgtgctctccatcgtattcgccgttcggatcgcccgcagcgatgacgggggtcagtcctccctgcttggcaagctcgcacgcccagtccatagcgacgccggattcgtggacgaagatgctccacagtttttcatccaggctgtagccgctgacctcgtaaaggcccctcataactttatacggatcggggtccacgccaagttccttgcatagcgcgctgttgaaggcgaacatggatccgcccatgcccgcagagcgctcgcttttcgcgatcatggttaccgataggccttcgtcgattgcgctgcaggcaacggagaatcccgaaatgccggcaccgacgacgatgacgtcggcctcgatggtttcagagatcttgtcgtcgccgatcggctcgggggcgacttcccaagatttagctgccgaggccgaggtggaagtttcgtttttgccttgttcctccttgggggccgcacagccaacaacgccggcagcggcaaaccccaaagcgccgatggtagcgcccgaaaggaacgtgcgccttgaaatatcttttcccatttttcctcctactaagagttgcatcacgactgctgtcgataagaaaaagataggtccaggcgtgcttataaggaagcaacgctctcgttcggccggaaatgcattgtttcgggcaagctggtcttggctcatctgtgtcttttgcggtaaactcaattcgcaaacgtcggtttaatttgctttttcggttcttcccttgggaagcgctcgatcgatagctgttttctttacagcctttggggaacggggagcgagtgtgaactttgattctcttgaactgtacaaaatcatctaccaggaaaagtccgcatctcgcgctgcccagaaagccttcatgacgcctcaaggtgtcaacagggtgctcagggcgatagaagcagaaatgggctcgcccctcttcgaacgaacagcttctggtttggtaagcacggcaagcggagataggttctatgatttcgtcgttcatgttacgcgtgaattcgaatggctgaagcaaagcatcgagtcttccacaggacgagaatcaacgattgtcagaatcgggttcgagcccgatctgcttagctcgacaagcctcgaattattcgatcggttttcagaaatacatcctgaaatcaaactcgaattcgaggagatgagcgaggaattcgtcgaagaaaagctcggggcaggagccattgatgtcgccttcgtggttcttccgtacgatgcagcagactgtgaggctattccgctcaagacggaacgggtttacttcctcgcgaatcccggcatcatccccgaaggtgtcgaggagatagggttcgatgattttgcgcatcttccgttgattaccgtagatcggtcgttcaaggcgcgaagggcgtttgacgactattgcgaatcagctggaatcaagccaatgattgcgctggcgacgaatgataagactctgacgtacaatatggttgaacgagggaaaggcggcacgattattgccgagcatgaattgaatatggttcaaggcatccgattttctgctgttccgattcgcaatgtgacatgggaatacggattgagctttaaaaaggatcgcgagcgatcaagcgcagtgggcctttttctgtcttacgtgctggattgctacggagcagacgggcggagctgcggttgcggccattgattttggcaagcaatcgcgccaagcaatggcgaatgttgttacggagccaggcttgagcgcggtgagtcgcgcaaagcgcagtagcggttggcaattggatgatgatctgcggatgcgaaattgcgtaacggtcgtagcctcgggcggcagaacatctcgcccggaaggcctcgcgtcttccgggcgattgcgccatgagttttacagacgatttgcaatagcgtgtttcgcggcaactcgggcggtgtttatgctgttgccgctgcatgatcccggagtgccgatggtgtagacgttgcggtatagcatgcagccttcgactccgacaacgtacagtccgtcgatgggggcgtggttttcgtcgatcgcctgggcgtttctgttcgttgcgacgcctccgattgtggtgaacatggcattgatgggctccgccagataatagggagggttctggattgcaaccatgaatttggggtccttgccccagaggtcatctttgccgttggcgcacatctggttgtagttttcgacaaaatcagacagggcggccgcatcgatgcctgcggcttttgccagttcctcgagcgtatcggctttgaacacgtctccctcaccggatttcaagccggtatcgagcatttggggaaggtcgtcttcgatcgtggcagcgtaatcgtcgaagatcttttggtcccagagcatgaacgaatgggcttgattccacttgggaggattagcgagcgacaggttgacggtacagttgtcttccttgtaaaaccgctcgcagttctcattgatccagggaatttggggcgccatgcagaagccgagatttgtcatgttgaaagagaacgacttgatgatcgaaccgcagttgtcggcggcatagctggagatatctttggctcctgccgagacggccatgctgtgcccggatccgtcgtcgaattcggaccccacagacagcagcctgtcggcaggatacccaatatgggagcaaagctcgtagttggcgccgaatccccccgttgctaagataaccgcctttgcgtttacgagcgtccatttgccgtcggtgccttgggcgtatacgcctttgacttcgcctccctcaacgagaaggtcgtctgctttcatggaaaactcgatctggataccgagttcgttcatcttgttggtcataggtgtaatgtatccatccatgatgccgcctttgtaccagtgaaacgtttggtagtccttgccgtggtaatcgtcgacttctccgaattcgacgccttgttcagcaagccagtcgatgttagcgcccgagttttccatcatttcgagccatgctaaaccatcggcgcgccactgggattgctccatctcgctcatgaggacatggttcagatccactgagattcccagtgatttcgaaatggacgaattgacgccgaaggatccctcgactccattggcggatgcaccgcccgtcagtttagaagcttcgattacgatgaccttcgctcctccttctgccgcttcgattgctgagaccattcccgaaaaacctgcgcctacgacgcagatatcgcaatcgagggttgtggcgatgtctttgggctcaacggcttttgcgtttgcttgctgatcctgatcaggagcgccgtcagtacttttggaactgcaagctgcaaggctgccagcggctagaacccccagagcgctcacggcggcgctctgtacgaaattgcgtcgtgatatctccatgactatccctttccctttatgctttccgcggtatcattcgatagatgccgtgcaagcagaataggggtgggcgcacgttctcgaaacatggtgggcgggcgattttcttgaaatcacccacgctgggtgacggtttcgagagcgctattcggagcgataatgtagaatccgaccaacgggaggtgctatggatccaagaaatgcgtggtttttcattttggggtatggtgcctttgtcgtaaccgcaacgctggttttcgttccgcagggatatcagctttttccgacagggcaacttggaccagaaacgattctgaacctatcgttcgctctgacatacggctttattgccgccctgtgcttcaaaaagggtgttgtgggcatatcttgtcggattgcttgggcctgcattgctgcccttattgctttgcatgcggtcctgtactaccaaaattactgtggcggggctcttgcggaatcgatcgtcgttgcttccaacatcctggttggctcgtgctattctgttttgttctgcttctgggctgggtgttcgaggatgatggggaatcgtgattttcggttttgcatcttgtcgggcagcctgctttcctcttttgctgtcattatgataacggcagcgcataatccaatggtcatcttcatctgcaaatgtcttcttttggtggcatctgtagcggcggccagtacggttaggaagagcatttcttttcgcagtgacgttcctggtcataggggatcgcatctgcggcagaatttgataggggcggctaaatcgctgcttgttcccgcagttggtatcggggtgctggggtttgtctaccagtgcgctttcgtcgccgttggcgttgattccctttctgggattttcttcgccttcggagaattgtttgccgtttcgattgttttgctttgcatcgccatgccgtcagcgtattccttcgatttgtcgagagcgcttaaattcttgtggcccattgcgttggtttccattgtgttgctcaatcttctcgatggaaccatgcgcctagtgttcatgggggtaacgagtgccgcgttcaatctcgggatcattctgctcatgcccatctgcgcatccgttggtcgcaaacgggggatttcggtgcccggtctttacggagccgttgctgggccggttaacctttttccggcattcggtcacatggtgggtcgtgtttcgtcggaaagcatgacgatcggtttatgcttcgcagcggctgtaattcttttgctgctgtttggggccgctgtgcttctcgacaaaaactctgccaggttcgatttgggattgggcgatatctatgctgccgagggcgactcttcttttcgacagggcgtcgttatgggacgggatgtcattgcagcgtatatttttgacgaatacggtcttacgcagagggagaaaggggtgctcgagcagcttttgctcggtcgtgatgcaccgtcgattgcggaagaatttgtcatttcggttaatactgtaaagactcatgtgaaaaggatatatacgaaaaccggagttcattcgcgtcaagagctggcagatcttgttgccggtatcgaggggtcgatgcgcctcggatctcaagaccgatcgtttgttgcttcgggcactgtggaacgagagaatgaccgctaactccgatagccgttgccctcagttttgccttattcgtttcgctatggtttgccggtttgaattctttagcgaatctggcgctaggcggattgtgcccggcaggccccaagggggattctgccgggcacggttgctgggttgggcgcttgggaaaagcaaggtgccgaggttttcgccctcgcaaggctttctgagtgctacgcgagcgcgttcccgacgatgaatccgctgctcaagcaccagccctgcatttcgcctggggtgacagacgaattgtaatagtatccaaacgctccgcctgcatcggatcctatcgcgtacaggcccggaaccggttgcccgtcgctcatcttcaggaccctgcactcggtgtcgatcttcaatccgccgagcgtgttgtagaacgccagtttgttcttgaagcagtagtacggagctttttctacagggaagaggaaatcggggttcttcccgtagcgggcgtctttcccttcggcgcaactggaattgtatgcggtgatcgtttcggctagctgcttcggatcgagtcccgcttgttcggcgagctcctcgatggtatctgccttgaaacagttgtaccctcccgattcgatcaccttatcggcgtagtcccgcacttcggggatgggctttccttcttcgatggcggtgaacagctgcccctgccacggaccctcggtggctatcctctcgaggaatgcgctgtcgaataccctgaaaaccttatcctgctgcgataccgcttcgccgttcagcgtccaatcggcaacggtgcacagctcttctgagacgaagcggtttgcgctgccattgacccaaacgagtggctgctgctttgcgaaaagaatgttctcgggcgaggattcgcctgggtagtcggcaagcttgaggttcgcgtagctgaccgcaccgggatgatgctgtttgccgcccattcccaggcccattctgattccgtctcccatgggaacgcccgcgggtccgtaaaactcgactacatcgtagctgacgcccgtcttctcctcgaacatctccttgtttgcaccaaagccgcccgtggcgagtactacggcaggtgcgctgatggcaagaatttctccggtggaggtctttgccgaaatgccggtaaccgttccatccgaaacaatcaggtcgagtgcttcggtttcgaagcggaactcaaccccgtgttcctgggctttcttgtaaacgatgtcgatgagccccgggcctgtcaagcctgcgtcatcgacttcgggggcgacgggctggtggacatttcccagtacgttgaactggactccttgctcgatcagccagtccgttgcgggtccagagtgatctgcgtatgctcgaactatgtctacgttgcaggcgttgcggtgatattcggtctggatgcttacgtagtcttcgatgcccatggtgctgtcgtcgtccgccatatctgaggcttcgaatgcggcgaaaccagccgtgtaacgggaacagccgcccacggcagcttccggaagcttttcgagcacgatgacgtttgcacccgattcagccgcacgcgttgcggcgacgagtcctgcggttcctgtacctacgatgacagcgtcggcgctaatgggcgtggcattgctgagatcggcttctttcggtttgtcttcgatggccgcttccgtctggctcgtgcatcctgtcgctcccattgccgctgcaacgccgaggccgcctgctgcgagaagaaaactccttctggtgatttccatgatcccttcctccttttgtttgcgcttgctactcgatgctccttgcggagtttgcgttgtcaatgttgatccaagcatgtagaatgtcatcaccaattaagcccaatgatgaaaaatcgtctcacccgctacgtatgatgagatgtttgagcaggcgatacatgattccttatttgaaaagatctaaatctttttgggttctccttttgggattcgcgctttattgcgtctggtcggtttctgttagcattacgttttccgctgctgcgaatgtattcggcgagctaagttctcttttctggattttgtcgaataccgttacgctggtatcgcttgctttatgccggattggctaccgcagggtcgattcgctcatcggaaccgctattgccagaatggttatcggttgtttggcgccaatggggatagtgatgctcctgatcggcctcggtgttgattctgtcggactctgtttgggaggcgttgccgtcgcctcggcggctaatattttccaggtgatgctttgggcccatggttttcgttcggcggcaagcgatggtgagaggaagttcgttgcttttgctgccgtcgccgtcgcgacgtttgcctatcaaggggtggccgctttagacgagacctctcggctgtgtttgacggcagtttttgccatcgcctctaccgcaagctatttcgtgcttcgccgttttgctccgatggcgaaggcggtgcgaaaaagggagcagcgacccgagaagtcgggattggttttcctcgccttcgtcttggtcgcctcgatcccgatgaactacctgaccacggttgcgggcaatgcagagggcggtgtggcatatgggggcgatgccgtttttcgtatagtaccgatcgtccttaccttgtttatgggtcttgaggctctcgcgtacagaaaacgggctaccctcgtccctttattcgttgtggtgttcttcacgggcgcaatgcttgtcctgcttctttccgatgaatcgtctggcgtgttgttcggcgtatccagctacgttgggttttatttgcttttgccgatgatgtattacgagatggcggtgcgatcaagcggtgtcgggtctcccgttaaggcgttctcgtcgggtttgctcgccaactccatcggcgttcttctcggaaccctgttggcagcggcaggtgagcttttcgatagttcgacccccgctcttgttgcaatgcttgtcacgtatggaaccataatccttgctgctgtcttcttgccaaacagcgcctataggctttttacggcaagaataccttccgaagttgaaaggatgggaaacccctatagcgaggcagtcgatgaaggatgcaaagaggtagcctctctgtacaggttgaccgatcgagaagaggatatcgcggggtttctcgttcggggtcggtctttagcgacgattgggaagatcttggggctttcgaccaacaccgttaagacacacgtatctcatatatatcagaagtgcggaacccacaacagggaggagttcatcatcttgttcgagtcgtttttctcggagtgatatccatcttgcgcaaaagagcgatgggggggggtggatcgcatcttccttggcggcgatccacccgcatgcgctatcggcgcattctagtgttttccatgcaccgttgcgctcagcccgccgccttttccaaagttctgataggaagcttgcatttcatcccgcgttacaggattcgaaagctcaagggagccattcactgcatggcatgctgccatgcggcctgaagtcatgcatgttccgcacgacattccgactatgtaagtgctccagtcgattgctccgcagatgtctcctgcgttgaacccggctgaatacagacccgggatgggtggcccctcgccgtctaaacctggtagttttcgttgacggcgattccgccgcaaatggccgtgattctgatgttgcgtctgatgccccagaacgggggcgtgtcgatcggcttgaggtacttcttttctttgccgtagtcaacgtattcgcctttttcgcatagttcgttgtagcgcgcaacgctttgcttcaaggcatcggcaggaactctaagcatttcggcaagctcgtcgagggagtctgcgcgatgcgtgtcgatgagatcttcgacgattcctgttgcgatgcctccttcttcggcgctgacgccagaatcggggacgaaagcgagcagttgcttttcgggggccgggctcccttcccattccgttgcgtaatcgaagtagttactgtcgaacacgtggcagaactgacctgcgggatgggcattcgtgcgcaggacgtcgttccagttgtcggttgtgatctcctcgttcatgaaccgcatgcccgcttggtcaacggcgaggaacggctcgcttcccatggggccggaatcggcatcgtgtatctgcctgctgtggttgaccaagcacgtgtggccaccggaaagtatcgacatgagatggccgtcgcctgtcttgttgatctgcttttgatcgaaattgacgaggtcgagactgtatctttcgaccatcgagtcgttgttttggtagtcgccggcggagaggattactcctttggtcgcgttgggcttcgcgtagctgttggattcctttttgccgatgacgcctgtcaccctgccatcttcgacaaccaattgaacggcgggggtttggtagtacatcttcgcccctcgttcgatggccaattcgcctaggtgttcaaccagagttccattgttttgcggctttggaccaaaccggttcgtcagtttggtgatgtagatctcgtcttcgtactgtacggtctcgtttcttgtggatcacgctggtgaatgcttctcgcgcgcatcggctgtcgcccatcgttcttctcggttgcttcttcgttttaacagagatgcttgcagcgtgtctgagctactttattgtgccgatgctgtctcgctatcttgcgatgcctttcgataattacatttcttatttttccgtcggtatagccctgatgtcgataggtgcttcgttcttgcttttgagtagcaaagcctttcgcgacagcgagcagatgggcgatggcgatgtccagacgacgcgaagcgatgattcttggcagcgggcgtgcgcgctgatagccgagcgctgcgggctgacgaatcgcgagacggaagtaatgcttctcgtgtcgagggggaacagcaaaaacaagatagccgatatgctttttgtcttgagcggaaccattcagactcacgccaagagtatttatcgcaagttcgatttgcattctcgacaggagctgatcgatcttgtttcacgcgaaatcgaaagagaatctcgaatggctgattccttggaagatctggttccttggtgatgtataagagatcgggcgaggtgctggtatgcgatctcatgcaccccttgtacggctccagttgatggcgcttgcttgtaatcttaggattgcattgttagaatgaaagtgggtgaactggcgatccgatcagcagggggaggcatttgtttggcttcgaggtggtgctctatctatgtttgggcggcttgggcggcggtctttgcgcggttgccggaattgccggattgagcatccctcgtcaatttctggaaagcgtttcgctgtcggagtattccagtctcatggggtcatcgttcgtgctcgcgtcggcatcccttgtgctgggaagcttgtttctgcttgccgatgctggcaattactctgcattgatccacctttttatcgcaccgtctttcagttatttatcggctggggcgtggttcatcgttgtcggggttgggctctgcttcgcattggtgctgttttggaagacggaaacgaatggccataccgtgtttgtttcgcgtgcgcttcatgcggcgtgcgctttggtcggcgtggccatcgctttatataccgggttgtttctggcaagcatgaaggcggttcccctgtggagcacgttttggcttcccgcactgttcgtgttgtcttcggtgtcgtgcgggataatttttttcatggcgttgattcagtcgaacggcaaggcgactacgtttccttccttcaaaaaacggcttgcgaaggcagatatcttggtagtggcgctggagctgctctgcgctatcgcgctggtgttcggcttgctcatggcgccaatcgatggatcgacggatgctgcgggagccgcttctgcgctcgatttgatatcgggggaaggcgcttgggtttggtggggcggcttcgtcgggtttggcttgataatgacaacggcgtgcgatgttctcactcttcgaatcgaagacaactggccgggtcgcatatggtcgacgttgggcgcatcgttttgcgttctggtcggtgctttttcgctgaggtactgcatagtgatggcgggagtgcatcccgttttaggattttaggagatgaagatggaaagcaaagacgattcttttccctttgaggttgatcccgattcaagcttgcctccctggctgcagcttcgcaagagactcgtcttcctgattgattcaggctactacaagcccggcgatcagctgccgaaaatccgcgagcttgcagtagagatatccatcaatttcaatacggtgaacaaagcctacttgagtttgcagtcagatggatatctgaagtccattcgcggcaagggcatgttcgttgccgatcctcttccgggcaacgaagcggggtcggcagaagatcttgaggcggttcttgatgattgccttcacgcttgcaagagcatgggccttacctatgaagaggctgcagagcaaatggtgctaagggcgaaaatgcttgttatgatcgaatctcttccgtatcggctgcccggctccaatgtgattgcgttgcaccccgataaccaggcttccaaaaagagcaaggaggcttagcatgagcgttctgggcggcaaaaacaatcagtcttcgagggagggcgaaagcgggaagttcggctcctgccgtctggcacccgaggttcttgacggttcgtctggggaaaaggcgtcgggggcgggcgttgtcttgctcagcgcttttgttttcgtggttgctttgctgctcgttgcggggctgggcgttcttgttgtgggatcgttcaacctcatcgttgccgtatcgtctttcgtgatcgctgctctggctaccatgtcggtgcacatcgctcagcagtgggagcgcgttgtcgttttgcgtttcggaaagctcaaccgcgtgtctggccctggtttgttctggaccatcccctttatcgagcacaacaccatccgaatcgattgccgcatgcgcgcaacaaggatcgaggccgaagaaacgttgacggccgatctcgttcccatgaacgtaaatgccgtattgctttgggcggtttacgacgcgaaggcggcctgcaacgaggtgagcgattttgcgcgtacggtaaaactgatcgcgcaggcggctttgcgagacgccatcggccaacttacggttgcagaggtagctatccgtcgcgagcagctcgatatcgacatcaagcaggtactcgaggacgaagcgtcgcagtggggcatcgccatccattcggtgaaggtacgcgatattctgcttccgccggaactgcatgagatcatgagcatcgaggctcaggctgaacagcgcaaaaaagctcgcatcatccttatggataccgaacaggatatagcggcagttgccgaagaggtgggggaaacctacggcggcggcgatgctgctctgcggctgcgcgccatgcacttgctgtacgaaagcgttcgggaaaccggaggaaccgtggtggtgcccagctccttcagcgaggggttcggcgatgttttgcccgaaggagtgaaataccctggcaaaggcaagctctaaggaactcgatgggaggtcttctaatcggatgccttctggccgctgagatagccgctatattatcttgaaatagaataatcaatcctaggattgcatatttaatcctaggattgattatgctattctccttatggatgggattgatcaatttccgaagatgggagggcaaggcacaggccgagccttcggaaaaggatgggaatcgaggaaagggcttcggccaagccctttcgataccctccatttgataggaggagagaatggagaaatccagcaggcagctgactcgcaggtcgttcctgaaaaccactgcagcggtagctggggcggcaacggttgccactacgctcggctgcacgccgagcgggggtacttcaagcggcggcgaggaggctgtgcctacggtagccgatgctcaggtgttttcgaatacgtgtcgggggaactgcggcaatgcgggttgttgtcttgatacgacggtgcgagaaggcaagattgtcagcaccagacaacaccccatcaagacccagggcgttcgtttgcagcccggttgcgtgaaggcagctgcgaatccgcaacgtatttacggcacgcagcggctgctctacccgatgctccaaacgggagagcggggaagcgataattgggagcgcatcacgtgggacgaggctctaaaactcatcgccgataagatgcaagcagcttttgacgaatacggtcccgaatccgttggcttcatgtctagctatagcggcaaatcaggtcagcttggtacagtctacaatggctttaccaactttcccgagacgcgcgccgcgtgcggcattggtcctgagcgtttcttccggaaaaccggtgtcaccctgtttaccgctacaggggatgcggctggtctgtatatgcagtcagtcatgctcggcggcgtgagcaactcggctgaagattcggtcaatgccaagaccatctacatgctgggaaacacttgcgattcgttcaagaccgcatggtcatgtttcatggaggctaaggaaaaaggcgtcaagctcgtggtgatcgatccgcgttattcgaattctgctgctcatgcagaccagtggatccccatcagacaaggcaccgacggtgcgttcatccttgctgcctgcaactacatcatcgacaacgacctcatcgattacgactaccttcgcaataaatctgtggcacccttgctcattaaagaggacggcacttacctgcgcctgtccgatctggacttgccgttgttcaagaagaccgatccgatgtcgggcaaagaggtagaggtcgataccgaggtcgtctacgacgaagcgacaggggaattcggttcttcattcgaagtgaaagatcctgccgttacgggcactttcgatgcgaacggcatcgccgtacgtcctgtgtacgaccttgtctgcgaaacaatcaagccttttacagtcgaattcgccgccgaagaatgcggtctccccgccgaaaccatcgaagactttgctcgcgaatatgccgaaggcccgtcgttcttcgccaattattggggctttcagcacttgcagaactcgtggcgtatctactacggcttgttcctacttgcatcgctgactggcaacgcgtgtaagccgggcaccaattatggcaattccctgcccgcaacgcagtactttaagaagcccatcctcaattctacggcagccctgacggtggaagacgccaagctttctaagatggcctctctttgtcgggtccctgaaatcgtaaactcgggtaagtggtccggagaagactacaccttgcgagtgctttggattgcgggggcgaatccgattgaatgcggcattgggtatacagagcagatagaggcatggaaaaaggtggatttcgtggttgttgcttccgagtacatgaccgataccaccaagcaggcgagtcttgccttgccggttaccatgtctttcgagtccgaagatttcgatagctacatgaatcagaaagccattgatccgataggggaaagcaaatcagatttcgaaatctttgttgcgttggccaatgcgatgggctataccgacctgtatgacaaggacgctgaaggctatctgcgcgagcttctcgatacggaggagaacattgctgccggcctcggatatgatgactaccacgaaaagggtgccatttacaacgatgagatcaaaagggtggagtccgtcggccaggaatataacgccacgggacgcacgcagttctatttagagaagctggcaaccaacggcaactgggatgttacggtcgaagcggtcgatcgtatgccgtactacgagcatgcttacgaggcttatgcggataatccgctgcgcgagaagtacccgctcttcggtctttcatatcatgataattatacgggccattcaatgcataacaacgtaccttggctcaatgagcttcgtggcttcgagggcaccaagggcgctggcgagccctatacgatcatccacgaagcggctgcggccgaacgtggaatcgagaccggtgacaaggtccgcgtattcaacgaccatggaagtttcgtcactcttgctctggtgtccaagggcattcgagaggataccgtcaacattccccgcggctacgctggtcaagagatgatggaagggcacctccaggcggtaacaacgatcgaggcaagcgacaaaatcaccaataacgacagccataacgactggctctgccaggtagagaagatatagggaggtgcagcatgacacgttacggaatggcggttgataccaaacgctgctcggcttgcaacaactgcgccatgacctgcaaggtggagaataatctatctgagggggtgtggtggaacaatgctcgcaccgagggcggagaataccgttatacgccaggaggtacttaccctgacgacctgcatataacgttctatacgtttgcctgccagcattgtgatgagccggcgtgcgtttcggtctgcccgacgggcgcatctaccaagcgcgaagatggcatagtgacggtggacagcgagaaatgcatcggctgcgatagttgcatcgctgcatgcccctatgaaggcgtgcgaactcaccttgacgagccgacatgggccctcgatttcccgatgggggacagccaggctcccgaacatcgcgcgaataccgtcgagaagtgtacgttctgcgctcatcgcgttgacaggggagaattgcctgcgtgtatcgaaatctgccaatctcaggctcgctatttcggtgatctcgacgatcccgattcggatattgcgaaggtgcttgcttctcgggaatacgatcagctactgcccgatcagggaacgggcccgaacgtttacttcctcaagtaaacaagttcgagcatcggcatttgcatgtcttttggagccctgtcgcgttgcgcggcgatgcggcagggcttctcgacggcgcatgatcgaacgtgggagcgcttaaggacggcaattgcggtaacggtgtttgaaccaatcgaggtaccggcaagcgataagatagcaggttgtgcgtatggaaaagacatgggagatcaaggctgcgctctacgagttgttggcaaaaaccttccttttcaccgagcgggaggtcgttgaagctttggtgtcgggagattacagcgaggcgttggttgagctgattgcggccaacaacgtgcaggcggatcttggggaagaatcaggtagcgatctggattgctaccgtcgaaaagacgaaaacgaagtgtttcacgatttgaggagggagtacacgaggctctacattggaagtcgcgagcccctcatcgttccttttgccggtacccgggaagccgcgagaagggggcaagagcctttgcttttcgtgggtaaggagtccatggagattgaacgattcatgcgcagatgcggcatagtgcaagctggtgaatccaacgatcctctcgaccacattggatcgatgctcgagtttctcatgcatctttgcatgctcagagccggaatcgtgaaaccgccagagggcattgagattccggaaagtgcctacatggatttttatgaagagcattttattggctttgcgcacgcgtttgccgaggaaacgattgcgggaagtaacgagaagttcttcacggttgccgcacgggttctccaagctcttccaggtgaaccgctgtagctgaatacaactcgtattatggagcgacctgaataggcgggcatcatgcatgaggctataacggcaaagaacatcacgaaaatcaaaagtccttttttcagggaaaacgcacagctttatatcgacatagaggcggagtatcgtactcggatggcttctttcggtctcgattattcccatgaaagctatcttacgccatacgatccttgggtcgagggtctaacagagcgagggctcagcatagccaatgaccacaggagccttcacataggatggatatcgccgtcgtgtctgagttgccgcaagggcgttggagctgcgacattccagttttccaaccaatgtccgcgcaactgctttttctgcttcaatcgaaaccagaaagattacgaacgcttgcttgtggaaatggacgaccccatcgcaaagatcgaagcgtaccacgcggatggagtcgtttttcacgatctagcgctttcggggggagagcctctgcttcatacgcctaaggttatcgagtacttcgcaactattcgcaggctctatccggacgcctatactcggctttacaccagcggggcttttttcgatgtcgagacggcggaggcgttggcgaatgcgggattggatgaaattcgtttttccatcaaaacggatgattcggagatcgagcgagagaagctgttttcgctcatgagcattgccaaagccgcgcttcctgccgttatggtggagatgcctgctatgcccgatgaatttgagctgatgaaggatctgcttgtgcggcttgatcggcttggaataaacggcattaacctgttggagttgggatttccctttaacaatgcagaggagtatgctcggaggggctacaagctcaagccgcagctgttccgtactctctacgactacacgtatgccgccggcttacccgttgcggggagcgaagatgtttgcttgaggcttttaggttttgcgctcgatcagaggctgaggctcggggtgcactattgttcgttagagaacaagcactctgcgcagatatacctgcaaaacattggctataaggatgcatttgacttctgtgagttttcggagcgcgactattttctcaagtcggtcaaagccttcggcaaggatgccgatcttatcgagcgtttccttgtggagaagggccttgaaaactatcggaaagatagcgaagaccgccttatcgaatttccgccatcctatgttagccggttaagaagaagctttccaaagcttcagctaggattgagctaccacgtcataacgggggagggcgatgccgttgcgctgcgggaactccgtctcgatctgataactcctaaaaccttcaatcttggcaaagacgtttgaatttccatccagaaaggatcggcagatgagttttcttctagtgctggcgtgcacggttgtcttgacggttttgcttaaggatgctttaaggaaacatccgacggtgttttacgcaggcgcgattgttctgaccgtgctgtatattgggaacctttacgtagcgtatcctggagtcgtgcgcagcgtgctgttcctgctgatgcagaagtgcacgctctcccttgctttgtttgtggtcgtgatgtacatcggggtgttccgaaaagactcgaaagttggtctggttctcaggccgattcgtgcagagctttctattttggcgtgcattctgtgtttgggccacgtgtgcgtgtatctgatggctttcgcaccgcgcttcttcggcggcgacgggtggctttcggcgtttcttcttaccgccgtagccctcttgattctgctgctcgtgctgggcgtcacctcgttttcgagggtaaagcgtcgtatgggtacggccttttgggtgaagttgcagaagtgggcatacgtctttttcggtttgatttacgcgcaccttgtcatcatccttcttccttcggcgctagcgcaaggcacaacggctgtgacgagcgtcgtcatctatacaggtttgttcgggttgtatgcgattctgagagcgcgtcgtgcgatagtcgattccaaagtcagttctgtccatcggttttctcggcggtcgttttcgaacgaattgccgcatggcgagcagccgaaggggatgactggcgtctaagagcgcctcatccaatttggtttcatccaatcgatgaaatttttattctcatgtccttttcgggtactgcaacggttgacagctgtttttcgctgtactaaatagtatgtgaaaatctgatttcatcaggtaaaacacaattaaatcagttgtaattgactcgaaaggagaagagagaacgtgaagcgaaacgacgcactgaaacgcacaatgtcgatagttctctcgatggccctggcgatgtcgttcggattgccaacggtagcttgggcatcgggggggggggtgcgctctccgctgcggattctgcggcgcctcagcttgatgacggcagcggagaaggtcgacttctggatgggggcgagacggcgtcttcgaaaaacccgacggaagaaccgaaagcgcttgccgcggacgacgtccttggcgagacggacgatagcgacgtatccgctgctcctttgtcggcgggcgtagcggaggttaacggccagatgtatccaacgcttaaggacgcgttcgccgccgttccgttcgatgggaccgagacggttgtcagaatgctcgacgacgtcgaaatgatttccgacgatatcgtaacggtgcaggaaagccaaaacgccgttctcgatatggctgggcaccgcatcaccgctgcaagcgatggattcaaaggccgccccgtcgtgaatcgcggcacgctggttgtgcagggcgacggaacgatcgatgtgagtggagcccgggagaacgggtggggctctattgaaaattacggtacgctcaccgtggtcgacggtacgtttcgtggtacgcttgagagcaattcggtgaacatctggaaccgtgcgggcggaaatgccactttcaagggcggcagatacgacaccaacgcaactgccttgcgcaccgcagaaggatcgacgactgcaatcgaggggggatattgggaaagcccctggtattccgtggtggaaaacggcggaacgatgaccatttcgggcggcgacttcaagaatacgtcgtgcagcgcctgcgatagccattggggctatacggttcgaagcggtcttgaggctgatggggcatacctcgcgttcgaaagcggcacggtcacgggcgttcagggtggccttgcgatcgtgggaggctcggccgacatttacggggggacgttttcgacggtcgattgcgtgaacgattcaacgcatacggcaacgttttacgcgctttacgtagcgggtgattcgtacgagacctctgcaacggtgtacggcggcgagttttcgtcttcgcagcgcgaggccgtgcacgttggcaacaacaatgctggaggagacgggggcaaccggcaagaggccacgattgtcatcaaaggaggctctttcatgggtggcggcagcgggaaaaccgccatcgtaacggataacgtattgggcggcgcggcaatttctggcggtacgttctccgcaaagcctgccgacgatatgttcgcgcaaggctacgagccggttcaggggggagacggcagctggggcgtcgtcgtacccgatcccgtcgcatcgatcggcggcgtggattacccgtcggtgcaagctgcgatcgatgatgcgggcgagggcgagaccgttgcgcttttggcgaacaccgcagaaaacatagcggtgtctgtcgagaaaagcatcgcgttggatctttcggggttcacgctttccgtcgataagcccattagcgtcacgggggagcttgttgtcgaagacagcaaggacgttgccgatcctgctgtaagcgatgatttcgaaagcgtaacctatgcagcggggaagattgtcaacacgcgtgatgcgaggggttctgaggctgttgtcgtcgaagtgaaggatgggggcgtcttcacccagaagagcgggacgatcgaatcgatgaaaaactacacggttgcggtgtacggctcgacggttcccggtgcgagccctgttgaaagcaaggcgtttatcgagggagggtatcaaattgctcctgagggagggcctggcgtttttggcaacggcgcgtacctcaaagtgtccggtggcgtgatcgtcggcaccgacaatgccgccgttgcgggcaacggaaccaataccgatgcgattgcgtacggcgggacgacaatcgacattaccggtggtacgctcatcggccatatcgtctcggacggatacatcgcctgcggcatctatcatccccaatccggcgtgctcaacatctcaggaggcacgatttacgcagatgggggtgtcggcatcctgatgcgcgggggcgtgctcgatatgacgggtggaaccgtgatcgccacgggaagcacccaaggcaaggttggcgacagcacggttatccaagactgctatggcatacagattgacggcagcagcaagtactacgatagttcgaacagcgtggtgcatatccaagggggctctgtgagtgcggccgagggagttcccgctctcaacgttacagccgaagaggggggatctgctgaaaacaagatggtggtttcgggtggcgaattcagctccgagatccctgccgattattgcgccgaaggctttgagccggttcgcaacgcggatggaagttatggcgtggtcgagatcgagacaactgccgtttccgcctattctctgatcgcatacgagggcggtatgggtgaaaacgcactccccgatcccgagtgggcgttcgacgtggacagcattaccgtcgacgacgaaccgctttccgattcggacgcgcttcctttcgaatgggaatgggttgacggatcgggagctcctgtcgatggcgttgccgatgagggcgtgtacgagcttcgagcgtggaagagcgctgacgccgccgatgcgacgctgaaggttgacggcactgtgcttgaattcgccgatgacggcactgttgttgcggcaggcagcgatacaggtgaggctgcaacggttgaggtgcgcgccgtggcaaacgccgatgctgcggttgctctcgacccttccgtcttgcgaccggtttacaattcggaaagccctctggccccttctgctagcagcaaggctgcaatcaatgccctgagcgtgtccgatggcggatattgcgatctgggcacgattgagggaggatgcgacggagccgctgatcctcatgcccacgtggcgaaggggacgcgcttcctaaccagcgggaatcccgctctgcccattggcgaaggatccaagatcggccttttgtgggatgatcttcttcccgaagtgctcggcagccaagatcgcgtggaggtgctcaacgagaaggggcttgccgctgtcagcaagacgatcgatacatctcgggaaacctcccatgagttcaagtacgtcgatctcgtcgacatggcgaatggcaacgcgtgggtaggcgccgatggagaagacgtgaccgtgttctggccctatcccgagggagtaagcaaggaagacgaaattgcggtagcctacttcgagggcttaacccgcgattacacgcttgacatggaatcagctgacctcgatgcggagatcgtgcaggcgaaagcgcattccctagaggttgtgaaaaccgatgccggggtgttgttcgacgttccgtcgcagcagttcggtccgttcgagcttgtttggcaggctgcaggcgacggcgggaatgcggttgctaccgagtcgaatgatgaaggagacggtcagagtacggtttatgctcttgccaagacgggagatacggtgctgccgattcatgttatagggcttgccgccgttgccggactcgttatggcgggcgctgcggcgttgcgtcggatgaaggaaggagatctctcgtaagcaaggcgaagcttcagagttcttctgcgatatggttcgcgatggggtgcagcgaaagaatcgctgcacccttttgttttgtcaagtgctaccaagcgccgtaccgagagagtatcggggccatcttgaacaagtcggccgttaggcgtctatttcgaagatcagatcgagctttcgcgggcggccgtgggcgtcggtttcggtgattatcgaatcgacgtatcggtatcccctcgctgcgtagtcgtcgatgactgcgcggtgttcggaagcgaaggcgaacatgagggtttcgtaggcgatgcttgcgtattcgtactttttcatcgtggatttcctctcgtcgggcgatcgtcggttgacgtctactgaaatcggcgagtttttgccgattgtggcggtagaaacagaaaccgtgcctatcggaatgcgctaacacgcaacggaagcggaaaactccgtctgataccattactattcaagtaatggtatcaggctttgagcgcggcgtctcgtctcgaaggggattacggaacctcgagaatcctatgcctcgctgcttgcgatctttttcctgatgacatggtattcccgaaaaaggaaaatccccgttatcgctactgcggcgaggctgccgccgatggagccgaggaacaaagactgcagatgcccgatgtgcatcaagcttggcaggaggaaggggaacacggcgaacttcgtgagaatataggatccttgctgcagcacgatgagcagattcgcgattctcgcttgtcccgatgcttggaaatagcttgtgcccaggatgcgcaccatcgatatcggaacagtgagggccgatatccgaagaacccagcaggcgaagggaatatcgtctttgccgagcccgaatacgccaacgaagaattcgggaacgagctcgactgccgcccaaaggggcagaagagccgcgaagccgcatacgagcgtccattttgcgaactcgagcgtgcgcttcggaaggttggctccgcagcagtatccgatgagcgggcgggccgcggttgcgactccgatcccaggcaccagaagaaaagcaactacggcgctttctattcccgatgcggcgagtgcgccgctgaccgttgttccgccgtgcagaagcgagcccgcgaaagcggctacgagtacatgcatcgcaaaattgcagaaggcatcggtgaggcgcagggcgcttgaggggaatccgagtgccactgttcttatcaggagccgagggctcggtacggcatcgcgcgccttcagcttgaacggcatgtcccgcttcaggagaaacgctgcggttacgcctgcggcaaccgcttgccctgctgcggtggcgcaggcggcgccggtcgtgcctccttctaaaacgataacgaacagatagccgagcacgatgttgatcagaatgcttgtagcttgaattcccaacacgcgacctgggaatcctgcggttctcacgtaagacgaaatgccagtggcaattgtggtgaacaggctgctccacgcgattatctgcaagaaaggccgcgcgtggggaaggatctcttcggtggcgcccgcaaggcgcagcagggggtctgcgagcactgtggttgcaagggcgaaggcgaacgagaggacggctgcggcggctattcccgtacccgccgttctcgccgcttttttcggatcgttcgcgccgaggctcaacgcgatgacgaatgagccgccatcgccgacgagaaccgccaaagaggttacaagcaaaacgaaggggtcgcaaatggtaacggcggcgacgccgacggtgccgatggcctggccgaccagaatgccatcgataaccgtgctgactcgcatgagaaacaggcctgcgacaaccggcaacgcgaatctgacgagcgcctgcgggacgctttggcccagagctgcgttttcgagcttgttcaaaggtggtgcctctcgtttaacaaaccaacgcgtgcgccttgttcgcgccacgcggcgctttcgggttctcttcactgcttcgtgcaggtgtttcggcaatccctcagttcgcgggtcgtattataggacatgcgggcaatcgttgcccgagccgaatcgagccgtgccgagccgaaccgcgccgcgtaggcggcgattcgccttgtcgaccgtcgtacggttctggcaacccgtggaaaacaaagcgcgctgcggctgcgggataggcactacaatgggtggcaccgatagggtctcggaatccgatgcgcaccgccgcattcgtcaagagaaggacattgcatggaggtttctgcagaaaaagagggtgccaagatatcgtgccatggtgcgcggcgcttccttctcaagaggctgctgttcatcccgctcggagcgattgcgtttgcgacgacgctctacgcccagggaaaccccgcctggaccgagcaggtctacagtttgtcagcgtatccgatcgtgtcgacgacggttgggtttctgccctcgcttgcaagcttttcagtagccgagtggttagcagtgttccttttgctgttcttcttgggatacgttgtctactacattcgaaagatggtcgtgaataggggcgagcgcgggatgactgcgtatcggggcgtagcgggcgccgtcgcgatgctttccgttgtttacttttgcttcacttttacgggcgggttgaattactaccggtatacgtttacccattatacgggctacgaggtggaggagcatagcgtagacgagttggagcagctctgcgtatcccttgccgacggccttaacgagacgagggggcagctggaagacgatgcggacgttttctcccttgaaccaggcgatttcgagcggtatgcgcatctttcggtagaggcggtgcagctgctggcagagcaatacccggtgttggagcggccgctgtattcgacgccaaagccggtgattctttccgagctgatgtcgcaggcgggcattgccgggatattcgttcccttcaccatggaatcaaacatcaacgttaacgagcctttgttcaccctgccctttaccatgtcgcacgagctggcgcaccaatgcggcttcatgcgcgaagacgaggcgaatttcatcgcgtaccttgcgtgcaagcagatcgacgaccctctcgtgcagtacagcgggttgtactctgcgttcacccgttcgatttcggcgcttgcgaaggtcgatcccgaggcggcgtcgaaagtgcgggccggcttgtcttcggaggtgcagcgcgatatggagcaaagctcgcggcattatgcccgctacgatggcgtgatcgcagacatttccacatcggtcaacgatacctacctgaaagcgaataaccaagcggacggagtgggcggctacggcaggatggttgatctgctgctggcagagcagagggcgaccgtacgctgatcgcttcaaattcgtggaggctcttcttccaatccatgcaacgccgctcgcttgcgatatactatacgaacaaatgttttacctgaggcgagcaaagaggagaaggcgtgtccgaagatcgtacctacgtatgcatcgatctgaaatgcttctacgcaagcgttgaatgcgtgcagcgaggactcgatccgtttaccgcgaaccttgtggtggccgaccctgatcgcacggagaaaacgatctgtctcgcaatttccccggccatgaaggatcttggcatatcgaatcgttgccgtgtgttcgagattcccaaagacgttcgctataccatggcgaagccgcggatgaaactctatatggagacctctgccgatatatactcgatttacttgcgatacgtttcacccgaagacatccatgcctactcgattgacgaatgctttatcgatgcaacgccctatttgtcactgtaccgcatgactgccaagcagttcgccgccatgctcatggatgcggtgttcaaggagacgggcatctgcgcgacggcgggcgtgggcacgaacctctttcttgccaaggttgcgctcgacatcacggcaaagcatgtcgacgatcatatcggttgtcttgaccaggcggaattcgaacgcaccatacaaacgcatacgcccataaccgacatctggaacatcggacccggcattgcgaagcgcctcgcaaagttcggcgtgtacgatttgcgtggcgtttgccggatggacgaagatgccctctaccgcgaattcggggtgaatgccgaatatctcatcgatcacgcccatggcatcgagccgtgcaccatcgccgagatccaggcgtacgagccgagctcccattctatgggaagcggacaggtgctgccctgcggctacagttatgatgaggggcttatcgtgttgaaggagatggccgatcagctgattttagaactggtggaaaagcatctcgttgccgaatccctttccctgtatgtaggctatgagaaagagaaggatgctgaggttcctgccgaaggatactttgacggggggcacgggaggcgctctattggtgcgcggggcaatattccccatacgggaggaacgcgcaggcaaaccgatcgaacgaacctgcattccaagctcatgccgcgctttctcgatctgtatcgagaaactactcgaacggataagccgatccgccgcatcaacgtgggcttcggcggagtggtgccggaagagttcgcgacggtcgacctgtttaccgatccagaggccgaagcggaagagaagagccttcagaaagcgatgctcgccgttaaggataagtttggcaagaacgcccttttgcgggggttgagcctgacggagaaggccacggctcgcgagcgcaacgagcaggttggaggccaccatgcctaaccggcgcatatcccgagcagatcaggctcggcagcaaggcggtcgcgcccctcgtgccagccgggcacagcagtttatgccctttgccgccttacggggctactacgaacttatccgcgaacgtgagcgcatagtgcagccgaagcacgagttgaccgaagaagaagcccttgcgctttcgggaaagctttcgcgggtgcagcgcaggacgatggtgcgcatcacctactacgatggcgatgcctatgcgatttcgtgtgggatggtgagcgacatcgacgtggcatcccgcacgatcacggtggttcgaacgcgtatccgtttcgacgatatcctcgatatccgggatggcgaagatatcgaggaggaggaagacgggtaatcggccgcaaaaaatccgcacgccgcgatcaggctcgactcttaaagaggttcgcctcaggacggcgtgcggctttcgttttcgttgtgcgaaacgatcgttgagcgctaattctgcgttgagaggaagatctgaagcgacatttggtccatctggtcttggagctcttcaagctcgtcaacatgctggtcttcgtctttgaggatttccatgaggatgtcgcgggtggcgtaatcgaggacttcgccggcgagcacgatagcttcgttgtagtccttgacggtatcgacttccagggaatggtcgtttttgacctgctcgggaacttccttgccgatattgatatcgctgaggttcgatacgatgggggtgccttccaggaacaggatgcgctcgatgagcttctcggcatgcttcatctcggtgatggcacgcgtcttgaagcttccgctcagttttccgtaaccccagtcctcgcacatttctgcgtgaacgatatattggttgattgcggttagttcaccttcgagcagagagttgagcgtgtcgatgagtttttcattacccttcatggaaaggctccttccgattgcgtttgctaagcgagccgatctccttgtgaccggtaagcgttgcttttattcttgcagataacgctgggcgggtgtggcgggcatcccgcatcgtggtcgtcgcgtcattcgaatgtaacctgtatgtcttctgagttcagcgaggtgaactctacgcatgcgacgtggcaaaagtggggattgccgacggacggaacttgaaaactgccctcccgcggtttggcaaccgattcgttgcatgtctgcaacggcttgccgcgcatgtcccgatacctaccaattggtagtacctttcgtattgatcttggcaagatgccgggcgtttcgggctatggctaaaggatgtgcatgcaaaatccccggaaaacaactgcgaacgcgagcaaggcggtagtccctgttctgcttgcctgctcttttgcggcttcgttcagcgaaagcatgatgagtatatcgctgccgaagctggcagatgagttctctcttacgctttccgttgcaaactgggttgtggtcgggtatctcgttgtggctgcgacaagcgttacgcttgcggcgtttttgctgaagaggtttgggttgcgcgtggttttctttcttgggggaggagctcttgcgctgggcagtggtctggccatgctcgcacctaacttcccggcattgtttgtctgcaggttgttgcaggcggtatgcacggggcttttctttccgacggtgacgggcgtcatcatgatcgtcatcccgaagaaaagccttggcgtccaccttgccatgaacagcgggatcatcgcgcttggccttgcgatcagccccgttgcatcgggttttatgcttacctatttcggatggcgcgctatgtttttcgtgccgttcgtcctcgcggcggttctgctcgttgcggggtttttcttgctgcacgatgtggaacctcgaaagcaggtttcggctgacttcgcgagcgccgccctcagcctgttcggtctggggtcgcttgtatacgggttgagcgagatcacccacgatctcgctcccgctgcctgcgcacttggggctgcggctgtgattctgacgctgttcgttcatcggcagcttgcctcgaaagcaccgcttctcaaccttcgtcctttcgggcatccccgattcaccatagggcttctgctcgtcatggtgggcatgatggtctcattttccctgagcgtgcttttgcccttgtattttgagggagccctcggccatacggccttcttcgcgggcttgctgttgcttgcgcccgttctggtcaatgcgatatgcgcgcttgcaggtggcaggctgttcgacaggcggggtgcttggccgctgcttccgcttgggtttgcgctctcgctcgccggattggcgggcgtgtgtttttttggcgagaccatgcagaccggccttgtcgtggccttttgcgcgatggcgtatgcggggctcgggtttgcaacgacgcctgcgaaaacgactgctctcgatcagcttccgcctgaactgtactcgcacggagcggctattaactcgaccttcgtgcaaattggttcggcaatcgggccatcgctttttgtcggagtcctctcgtctgacgtgctgcggggaactgcggcgggcttatccaaggcggatgcgtatgcagcgggattttcccatacgcttgccattgcgattgggattgcggcagtcggccttgtggcggcgatccttttcgcctatacgttgcgtaggaaggcgtgatcccgtctagacgaaacgcagctgcaccgcaacaaacggacagtgtgcgcgatcaagcatagtcctgtgcggtgctgcagcgaagcttcgccgaaggcgaatcggtatctgccgagagaggcttaggcctcgtacacgatagcgcctgaggtgaatccgccgccgaacgccacgagaatcaccttgtctccccgcccgatgcgcccttcggcgtaggcgtcggcgagcgccatcgggacgcttgcggccgaagtgttgcccgcttcggcgatggagagctggaagaaatccatcggaaggtgcagttttttcgctgcgtatttgataatgcgttcgtttgcctgatgggggacgatgcaggcgatatcatcaagagaaagacctgctcgatcgagcgctcggtggacagcttcggtcatggcttctgctgcgaacttgaacacgtggggcccgttcatgcgcagcgtttggcgcgggtctcctgattcgacggcttcgcggatggcaagctcttcgtcgatgcggatggccgagacgtctttcgccgcagaggattgcgacgaggcgccctgcgcatcgaaaggcagatctgtgtcgtatgagagggggcaggtgagggcgttctcgtcatcgtctgcgttgacgatgaaactgcccagtatgccagggcggctttcgtcccattcgagcacggctgcgccggcaccatcgccgaacaacacgcacgtattgcggtccgcccagttcgtgagacgggtgagtcgctcggttcccacgacgagcgcccggcgaatggggtttcggcctgcgcttccgtctgcgcttggtgcggaggccgccatcatggcttcggcgatagtcgcactgtagataaagcccgtgcaggctgcgttgacgtcgaaggcgatggcgcttttgagtccgaggcggcggcggagcagtccggcggtcgagggaacgatggagtcgggtgtgacggttgcacagatgatcaggtctatttcttcgggagcaaaagaacgttcgctgtggccgccttcggcccaaccgagagcttgccgtgcggccgcttcgccaaggtcggcagacgactcttcaactgcaatgcgtcgcgatttgattcccgtgcgggtggtgatccattcgtcgttggtatccacaagcgcttcaagcgccgtgttttcaacttcaagtgcggggatcgctttcccgcatcctactaacgcacaacccactgttgcctcctgctgtcgaaggctcgcatcgggcgtggtgcaatggggccttcggttcctcaatgcttagataatcaaagtaaatagtgattctactccaaatgcgatgatgcggcttggaaatgcaggaatctccatgcatggttgagaacccccttgctcggttcgcttcgggcagcggcgaggtttgccccgaaggtcgcaagccatgcgagtcatgagggtggctgcgacgaacggcggcggccgatcgggctagtcgtcgattccccagagttccttcaattcccggttgatctcgtttgcgtttgcggggatgccgatatcgcggggcatgggtgttttcctgccgcgttttttcgccggctttgcctgagcgaaaagcctttccgagggcacgatgtcgacgccgtgcaacgcggccgagcggcagcggttagcgagttcgttatcggatgtgactacgccgatgcgctcggttgctcggcgagctttcgcgacgatggcgtcatcggcggttggcaggcgcgtgtattccgatcggggatgtgcatgggcggttgcggaggtggcgccagcgccgctggcggcatcccagactatcgtataggttgttttccccggcaaagacggcgtgccgaggcgcagccttttctcaagtgcggtgcgctgctcttcaagcgagaggtctttcgtggccgggtctcgccgtgtaacgttgtagccatctataaggtagtgcatggggtctatccgatcgggtcgtatgcgtgcagcgctctatgcgcagatgcgcgggttcctggcgcttcgggtacaatactaccacgcgacggtttgtcggtgatgagccgcatcatacgatgcgcaagcaaggagtgatggctgatgtacctgatgagcgatcgagaattcgagaacgtgatcgaggaagctctcgaatcgatccccgaaaaattcatcgaagcgcttgaaaacgtagccatcgtcatggaggacgagcccgatgaataccacttcgaaaccctcgatgagcctgactctttgggcggctctctctacgaaggcgagcttttggggctctacgacggcattccgctaaccgagcgggatggctattacgatggcgatatccccgatgtgatcactattttcaaaggccctcacgaacgcagcttcggctcgcgcgaggaagtggttacagagatcgggaagacggtcatacatgaaatagggcactacttcggcatcgacgacgaacgtttgcacgagatggggtattgatctgcgggtaacttttatcgataaaagataaagataagctgtacaatcatagacattgacgcttctacaaaaggagtccaatgatgtattgtgcgcatgtgcgtcccgaagatggtcgcaaggaatccattgccgatcatttgcacgaggtagcggaaatggcttcggaattcgcgagcgtgtttggagctgagacttgggcttacgcggcagggcttgcccatgacatcggtaaatactccgatgcattccagcatcgaattcttgggggcggccccgttgtggaccattcgactgccggtgcctacgagattgacgaactcggtttatctgcgctcgcttattgcattgcggggcatcatggtgggcttcccgacggtggcacgaagacggatgggccaggcgaccctacgcttcatggacgcttgctgaaggctgcggaaggaggcgttcatccctacgaagcctttcgaggcgaaattgacctccagaagcccgatacgccgcgattcttcgctcaatcgttcaagccttcggaagagtgcttcgctttggcgtttttaactcgaatgattttttcctgcctggttgatgcggattttctttgtaccgaacgctttatgagtggcgatgcgcgcgaagggctgtctgcggaaacgttgaacgagctttgcgataggctcgagaagaaactcgaatcattctatccgccgaaaaccccgcttaacgaagtgcgctgttcgattctcgacgcatgcgcgcgtgccgcagaggaagcgccaggcgttttctccctaaccgttccaacgggtggcgggaaaacgtatgcatcgcttcggtttgccctcaaacatgcggcatcggaggcgtcaagtgcgcgtcgcgttatatactgcgtgccctacacttcgattatcgaacagaacgccgctgtgtttcgcgaagtgctgggcgcgagaaacgtactggaacatcatgcgaatttcgatttcgatgaacatgaagacgagggcggagtcctgcggctggcaacggagaactgggatgcccccgtggttgtaaccaccaatgtgcagtttttcgaatcgctttatgcaagcaagacttctcggtgccgaaagcttcacaacatcgctggtagcgtaatcgtgctcgatgaagcgcaaatgcttcccaccaagcagctgcttccctgcgtgagggcgttggcagagttggtcaggcattacggttgcacggttgtgctttgaacggcaacgcagccttcgttgaatgggttgttcggcgagtacggttgcgcggtgcgcgagatcgttgccgatccggctggtcttgcccggaagctcaagcgcgtgacgtatcgctacgttccatctctgtccgatgaggatctcgctgctcgcatgaacgggcatgatcaagtcttgtgcatcgtgaacagccgaaggcaggcgggaatcgtatacggattgcttgatgacgaagggtcgtatcatctttcgacgctgatgcacccagtccaccgaagccgcgttctcaaagagatacgcgaacgtttggcaagtggcttgacctgccgggttgtatcgacgagcttgatcgaggccggagtcgacatcgattttcccgtagcctatcgtgcgcttgcgggcatagacagcatgatacaggcgtcgggacgggtgaatcgcaatgcgcgcgcatcggcggaaagtagcctggtgcacctctttgcgcccagcgagcggtatgcgcttccatccgatcttgagcagaaagcggcgatcgcgcgagggatactgcggcggcttggcgaaacttcggaccccgaaggctcgattgccgatgggggttcaggcgatggtgaaatcgcatgcgacatcggttcgctcgaaatcatcgagagctacttcaccgagttatacggattgcggagggataatctcgatgcgaatcacgttctgtcgaatctatcgaaataccagagcataaggtcgatccctttcgagcgagctgctcaagattttcagatgatcgaggacgggtcagtatccgttgtcgtacccgccgatgaaattgccgaggatatagcggcgatacggcgagaagatgcatcgcgcaacgcgctgcgtcgtatcggcaggtattcggtcggtgcttacgaccaggatatcaaggcattgttgcgcgcaggtgccgtcgaggccgttgcgaagggaatgtaccttctgctggatcaggcgagatacagcgaaaaaaccggtttggattgtgcctttgaagaggggaaagggctattcttctaggaagtgcacgaggtgcaaaggtctttcgaatcaacctagattctgaagatagtttcgtgtttccgtaccttgataaccgaatacaaagaaatcggaaaacttgatttgaagcgagccgacaaaagcgcggggacggattcagggcctatgcgttttgcattcagtgtacgaatggatcaaaaacaatttcaagaaaaagaaaggaggtgtccttatggcatatggaatacaggttgaagtatggggggatcgcgcgctgttcacgaggcccgagctatctgtagaaagagtaacgtacgatgtgatcacgccgagcgcggcgaggggccttctcgaaagcatctactggcatcctgggcttcgttataccatcgatcgcatccatgttctcaatccgatacgattcacaaacgttcgccgtaacgaagtgaaatcgaaagctcttgctagttctataaaaagctacatggtaaacggtggcgaaactccctcgataaacacgaaagaagacatccagcagcgagcttcgctcatcctgaccgatgtgcgttacgtgctcgaggcccatttcgaacttaccgatcgggcgaaaccggaagataatccaggcaaattcaaggacatcattcggcggaggctggaaagaggacagtgctattcgatgccgtatttcggcacgagggaatttcctgcccacttcagagcgtacgagggttcgcagcccccgagcggattctaccagggaaagggcgaacgcgatttcgggctcatgttgtacgacatggattattcggacactcgaaacatcactcccatgttctttcgggctgtgatgcgcgatggcgttatcgatgtatcggggagcgaggtgttcagatgatcctccaatctctcgtggaatattacgagcagctgctcgaagacgatcccgattccgtggctccgcccggttggtgtccccgcaacatcgctttcatgctcgagctgacatcggggggagagcttctcaacattttgcctgccgaagagaagcgcgggtggccaagaatggtgcctgagcaagcgaagagatcgtcgggcgttgaagccaaccttctgtgcgacaacgcgagctacctgctcggcatcgacgcaaaaggtaagccggaacggtcgctgcagtgtttctccgcatcgaaggaaaagcacctggcattcttgagagacctgcagtccgatgctgctttagccgttaaagcgttcttcgaatcgtggcaacccgagaatgctcttgaccacgcggcagtcaaagaggcaggcgaaggcttattggccgggggaaatctcgcgtttcgggtgaacggacgcgaagtgcttgatgatgccgttatcaaaaatgcatgggatcgttcgtatgcgagcccttctgacggtgcggttgtcatgacgtgcctcgtaacgggcgaaaaagctccgattgcccgcttacacccgtcgatcaggggagttgtcggtgcccagtcgatgggagcgtctctcgtcggtttcaattctcgagcattcgaatcttacggacgcgatgaagagcagggcctcaatgcaccggtcagcgaatatgcaaccttcgcctacacgacggcgctcaactacctgctcgctgatcgcaagcatcatattcggctcggcgatacgacggtcgtgtattgggcggaaaaaaacgatgcagcgtgttcaggcatgttttctcaagcattaggggccccttcgatcgatgacgaggaaacgaacccggacgatttgatcgatgcgatcatggagaagctcgaaaagggattgttgccgcgggaggtcgatctcaacgcaaccttctacgtgctcgggcttgctcctaacgctgcgcgtgtgtcggtgcgtttcttcctgcgggatacattcggcacgatgatcagcaacgtaggcaagcactataagcgactcgacatagtgcacgcctcatacgaagggcgatacctatcgccataccggttgcttgcagaaacagctaacccgaatgcgcgcgatcctgcggcaagctcggtgctgggtggagcgctcatgcgatccatcatcgaagacctgcgttatccagaggctttcttcagcaacgcgcttcttcgcgtacgggcatcgcaggataacgacgagcaacgaacgcgaaaggtaacgcgagggcgtgcggcaattctgaaagcgtgtcttattaaaaactaccatcaaagcgaggaggttgttaccgtgtcgctcaacgaagatagagatgatgcaccgtatgtgctgggaaggctgtttgcgatattggagagcatacaggaggcggcgaatccgacaatcaagagaactatcaaggcaacgtatttcgattccgctgcatctactccggcaagcatttttcctttgattatcaagcttgcggggagccatctgcaaaaaatatcgcaagaccgaaaaggacttgccgttcactatgaaaagcaagtaggcaccctgtgcgacaagatgcaggcatttccgaaaaggctctctcttgaggatcaaggctcgtttgttttgggctattaccagcaggtccaggatcgctatacgaaaaaagaagacgaacaggaggcataagccatgagcaagccgattgaaaaccgatacgatttcgttgtctatttcgacgttgagaacggcaatccgaacggggatcccgatgccggcaatatgccgcgtatcgacccggaaacaagttacgggcttgtaaccgacgtttgcttgaagcgcaagattcgcaattacgtcgaaaccgtcaaggagggctcgacgggcttcgagatatacatcaaggacggcgtctcgctcaactcgagcgacaacagagctctcgcggaattgggggtagacgcgaaagacatcaagaagctcaagaaagacgatcctgcaatcgatggcaagatacgcgatttcatgtgcaaaacgttttacgatgtaagaacgttcggcgcggttatgacgactttcgtcaaaggcgccctcaattgcggccaggtgcgcggcccggtgcagctcacgttcgcgagaagcgtcgaccccatcatcccagaggagatcaccatcacgcgcgttgcgataacgaccgacgacgacgctgcgaaaaaggggacggagatggggcgcaaatacatcgtgccgtacgctctttatcgctgcgaaggctatgtgtcggctaaccttgcaaggaagaccaccggtttctccgaagaggatcttcagctgttatgggatgctgtaatcaacatgttcgaacatgaccattcggcggcccgcggcaagatgtcggtgcgggggctcatcgtgttcaagcatgatagcgagctgggaaatgcgccgtcgtacaagctattcgatgccattagcatcgccaagaaagaaggcgtggaatcgcctcgttccatcaacgattatgagggtatcagcatagacgagtcggcaattcccgagggagtgacctgcatcaagatggtgtagccgatgtatgccgaggacgattacttggccttgtcgggtattcagcattttgcgttttgccgccggcagtgggcgcttatacatatcgaacaggtttgggctgagaatatcttgacggttcagggcgacatcatgcacgaacgtgcgcacgatgaagcgtttcgagaacgtaggggcgacacactgatcgtgcgaagcctatcggtcttttcggctaagctggggctttcgggcaaatgcgacgttgtcgaatttcatcgcagcaaggatggccatcctctcttcggggaggatggcctatggagagaatgtcctgtcgagtacaagcgaggtcgcagcaaagcaacggatatcgatcgattgcagctatgcgcgcaggtgctgtgcttggaagagatgttcggaagcgatatcgccgtcggctatctgttctacggagagacaaaatcgcgcgagcgcgttgagttcgatgcatcccttcgaagtcaagtgatcgagaaggtggcagatatgcaccggctttacgcgcgaaggcataccccgaaagtcaaaccaaatgcggcatgccgcgcgtgctcccttttcgacatctgcgttccgaagctgcagcagcggcaatcagtgaaggaatacatcgccgctcggataggggaagatgcgctatgaggcacttgctcaatacgctatacgtgtttaccgaggatgcgtacattgggctcgatggggagaatgcggttatacggcaaaacgagaaagagctgggccgtattccgctccatacgatcgaaggaatcctatgcttttcgtatcggggcgcaagcccgagtttgatgggagcttgcgcagagcgcggcatcgctctttcgtttttcagccctaaaggaaggtatcttgcaggcgtacatggggaagatcgcgggaacgtgctgttgcgaaaaacccaatatgcttgctcggaagacgacgctcggagcttagagttggcgaggagtttcattatcggcaagctctataactcgcgctgggtcctagagcgggctacgagagaccatggaatgagagttgatgtcgaaaggctaaagcttgcttcggctgccctagggtcatcgattgccgaaatcggtcgatgcgattccctggattcccttcgaggcatcgaaggcgaggctgcatcgaggtatttcggagtattcgacgagctgattttgcgccataaagaatcatttacgtttgaagcaagacgacgaagacctccgactgatcccgtgaacgccatgctctctcttttctacacggtgcttgccaccgattgtgcggcagcgctcgagggggtgggtctcgatccgtacatcgggttcctccatgccgatagaccaggacgcaaatccctctcccttgatcttatggaggagctgagagccgtcatggttgaccgatttgttatctcggcgatcaataataggatcatcgatcccacgtgcttcgactaccgagagtcgggagaggtgcgattgagcgacgatggcaggagagcgctattcggttcatggcaggaaagaaagagggatacgatcgttcatccgtttctcaaggagaaaatcccctggggcttggtcccccatgttcaagcgctcctgcttgctagggctctgagaggggatatggatggctatcccccattcatgtggaaatgaggcgtgctgtgctgacggtgattacctatgatgtcaatacggaagatgctgacggaaggcgtcgtttgagaaaggtggctaaacattgcgtaaactacggccagcgcgtgcaaaactcggtatttgaatgcgatgccgacgctgccacgatggcgcgcattagaaatgatttgataaagctcattgaccaggatagggatagtttaaggttttactatcttggcaactcgtatcgtacgaaaatcgaacacatcggtgcaaagccatcatacgatccagaaggtttcctttccttgtgacgctcggtgcgagcatggggcgaacaggacttcgcgcaggagcttcgcaccgaaatcatgccgtcttggtttaatttgaccgatctgaaagccaataagattaggggatatcccttatgttgtgggatagcctgagagtaatacaaaatattgcagtcactccccgcatggggagtgcgggttgaaatagagtttggggctggtgcaatggcttgcgcaggtgtcactccccgcatggggagtgcgggttgaaataacgcctgcttttccatggttatcatatttcgtacgtcactccccgcatggggagtgacgcttgagattggaaacgaacgatcgctttggaattgcgtcttcgccatttcctgcacgtaaagtgcgtacagaaaccgaagacgtcgccagcgttttctttgcttttggattttctaaacggaggagcgagcttaagccttgccgaggtttttccaccgaatgcctctgtggggtttcgagcggttcggtctgatctagattagctccttaagtccttcccgtagtttttccacaacatcaacgcaggtggcaacatctttttcggggatgtcctcgaacagcatgtcaattacgtcgccgatcttctcatcgtagagctgcgcgagttctcgcccgctttttgtcggctccaccgataatgtgcgactatcgttttcgtcgatgctgagagtaacgtagccggcacgctcgagtttgagcagaatctgtttgatgttctgatgagaggcgccgtttgcttcagagagctcggtgagtgaaggcggctcatcgaacgagcagagcgaagcaagcaacaggacttggcggcccgagaggccgaaaaagctctttcgctcgacgtatttaagcctgacgctgaagtacgagaggctccgaagcagctggcgctcggttgaatcagtgggtttgtactgcatggagttcctttcgcatgtgaggatgatcttccatacttatataataagttgcatgaacgaaattgccagaaccgttggatgtctgtaacaaaccatgaacagttcggcgcgatatactgaatgagttagccctgtttggtggctgacgagaaaggcaaggttgggcaagcggtgcagcagcgccggttctggttatgaaaggaagggacggcatggctctcaaaaagattcttgtagcatatgatggttccgatctcgctgaaaaggcgctcgatttggcgctcgatatcgcggtgcctaacactgaaacggctatcgacgtcgtgaatgtggtgccgattccgctgctcaatgaaacgcaggcgatcagcttcaaggagatcaccgatctgatgattgaagacggggaagacacgctatgcaagacgcacgacaagatcgagcctttgggcgatcgcgcgaatacgctgctgcttacgggcacggcgcccgcctccgagcttttgaaattggcgagcagcgggcactacgatctgatcgtgttgggcaatcgcggcctctcggggctcaaggagtacatgggaagcgtgagctacaaggtgtttcatggggcggatattcctgtccttgtggcgaaatagcactcttggcgcggcgcgatcgggcatcgagagccaagcggcgtcgttgcgctcatgaactcggctggaagcgctcagttgcagcagctacgggcgcttctgcggtagaaaccttcgttccaatgaacctctgacgcctaccgatcaggagctatgcggtttttgcgaacagtatagttagctgttacctaaaagggtagaatagtcggacaatttaattatctgccgccgggtagatcaagaaacaaagcatgtgcgcccctatcgttaggcctgagaagataggggagagcgcatgcttttttgttgggagtggtttttcatgaactgggttatcttgatcatcgccgggctgttcgaaacgttttgggcctatcagctcaagctgtccgatgggttcagcaagctcatgccgagcatccttaccatcatcggcatgataatcagcttcgggcttttggcccatgctcttaagactctgcccctaagcgttggctatgcggtatggacgggcattgggattgtcggagccgcgatactcggcatcgtgtttctgaaagaaccggcaagtgcaataaaaatcatctgcattcttctgatcggggcgggtatcatcggcctcaatctaacgacgcacgaatagcgcacgtgcgaccttcttcggcgaggctgggccttcggttttgcctcgccgaaccgcatgctgccgcagcccgaaaaccgggctgttctctgtgggcggttgttgccataggggtcattggggtctgcccgatcgttcgggcggcgctttctctgctgcgtcaggcacctcatgaatgctatgcgaagggcgctccccgaaacgtcggagaatatcgcttcgagagatgggataatgcgcaaaagggaagaagcgctgaatcgtgcttttcggctcgcgtcgtcgcttccttcgggcggcagcgccgcattcgacacggcgaagggaatcgttatggtaaaggcgctatcgagaagggcgttcgctgccatctgcgctatcgcgcttgttttcggcatcgtgtcgctttcggcctgcacggtaagcgaagccccgtcgcagtccggggagcagcctcagtcggaaggcaagctcgccattatccacaccaacgatacgcacggctacgacatggctgcagagccgaccgattcgtcccccggcgttatcggcatggcggcggttgcgcaactcaagaaagactacgaagcgcagggctataacgtccttttgctcgacgatggcgatgcgattcaggacaacgtgctcgttaacctttcccaagggagggcggccatcgatttcatgaactcggccggctatgatgccatgtcgatcggaaaccatgagttcgattggggcgctgacaatctggaaaagcttatcggccgagctgattttcccgtgttggcggccaatgtaaccgtggatgcgacaggagagccgttcgctcgatcaaatgcggtgttcgaattcgacgacgggacgagggtcggtgtgttcggccttgcaactcccgaaacgcaaacgaagtcgagtccgaaaaacgttgcgggccttacgttcgcggcaggcgaagatatgtatcggtgcgcgcaggagcaggtcgatgagttgcgggaacaggggtgcgcgatcgtcgtctgccttggtcatttgggaagcgtcgggggaatcgccccgaatcgctctcttgacgttctggccaacaccgagggcatcgacgttttcatcgacgggcacgatcatgaggtcgtgaacgagatggttaacgggtctcttttggtgagcacggggtgtcatactgaaaatatcggcgtcgtgctctgcgaagacggatcgtttgtcgaagagatggttgcttacggtgcctatgaaggaaaagatcaggcgaccaacgatcttgtgcgggcaacccatgacgaggtgaaaaaccagctctcggaagtgatcggggtgacgaacgtcgatctggatggcgaacgcgatcccggggttcgcacgcaggagaccaatctgggagattttgcggccgatgccatgctttggcaggcaaaccaggcgagcggacagacgattgacggcgccattgtaaacggcggcagcatccgtgcctcgattggggcgggggaggtcagcatggaaacgctcatgacggtgttcccttacaacaacagcctcaatgtggtaacgctaaaggggtcggaactgctggaaatcatcgaggcggcaacgttctgcctgcctgaggcgtcgggcgggtttccccaggtagcggggattacctacgcagtcgatacgctggccccgtacgaaaccggcgatcaatacccgaactccacgtactacgctcctgcaaatcccggctcgcgtgtgacgattctcgatgtgggaggcaggggcttctcgctcgatgacgaatactccatcgctgcatcgagcttcatcacttcaggcggcgatacctattatgcggtcgcggaggcataccaaaaaacgggctttacgacggggtattccgataccgatgcccttgtcaactacctgcaaaccgctttgggcggcgtcgtcgatgaatcgtatgagaaacctcgggagcgcatcttcatcgctgtcgaataagaggcgatttgctcaaggtttacggttcggtaccgctgggcaacaaacaggttgagcgcatgtgcgcgggtggatactcctaggcgacggacgggagtgccacggtatggattcgactcaaaaacacaagcgcgatatagcggctatctttgccggccttttgcttgccatgttcgtcagttccctctctgagacggttacggctacggctcttcccaccattgtcggagatttgggcggggtcgatcatatggaatgggtgaccaccgcgtatattcttgcggcgactatcgtgatgcccatctacggaaagctcggcgatcttgttggaagaaagcatctgctcatcttggcgctcggtgttttcgttgcgggatcgatcacctgcgggttcgtcacttcgatggaaggtctcatcgtaggccgggccattgagggcctcgggggaggcgggctcatcattctctcccaggcgacgatcgccgatgtcattccgcctcgcgaacgcggtaagtacatgggagtcatgggatcggtgttcgctctctcgacggtgctcgggccgcttctgggcggatggttcgtgcaagtgacgggttggcggtggcttttcgggttcaacgtcccgcttgccctgctcgccatcgcagcggcagcgaagtttctgccgaagccgacgcgcatcgagaggcgcccgtcgatagacattgccgggatggtgttcatggcgatatcggtttcatcgcttgtgttgcttgcctcatggggcgggtcgacgtacgcatgggattctccggccatcatcggtttggccatcgcctgcgtggttgccgccgtcatcttcgtattcgccgagcggttcgccaaggagccgatcatcccgctttacctcttcaagaaccgcaacttcgtgctatgcacggcggccggtctgttcatcatgctcggcatgatgggaacgacgacgtatctgcccacgtactttcagatcgtcgatgggctcatgcccgaacaggcgggcctgatgaccgtgccgatgatgggcggcgcaatgctcatggccgttgtgacgggctttcttgcttcgaagaccggcaaatacaaatggatgcccatagcgggatgtttcgttatggcgggcggattctttttgctgtcgcatctgtcggcgggaacatcgctcgttgcgaccggcgcatccctgctcgttttggggttcggcataggacttggccagcagatcctcgtgcttgtggtgcaaaacgagtttccgagcgaaatcgttggcacggcaacggcggcgaacaacttcttcaggcagatcgggtcaacgctcggggcttctttggtgggggcggttttcacctcgcgcttggcaaccgagctggcaaaaaacattcctccatcgcagcatgtcgatgtcgacaccatcacacccgagttcgtgcacggcctttcggctgcattgcaagaagggatcaaatcatcctacaacgatgccctgattccgatcttcgcttatatgattccgcttcttttggcgggcgcgatcatcatgatgtttctcaagcagcatccgcttgcaacaaaaatcgaccatccgggtcatggggcaagtgccgaacaggcggattccgcggcggatgcgcgatgatgcggcagctccggtgagaatgtgctggttgccgatacgcatgggtctcccttcgtgacgctctatccagcataaagtccgaagggcatgtgctggtaggaaaccgagcatcgatcgcaagccgcggactggaatttgctgcggagcctcttggttagcccttatccatcgggtaaacttgagttcgtcacgggagatcagcggaggcggatagtggagcttttggaagatcgcatcaggcaagacggcgtggtgaaagacgacggcgtcctcaaggtcgatagctttttgaatcatcagctcgatatcgagttgctcgatgcgtgcggcgaagagttcaagcgtctgttcggcgatgctttgatcacgaagatcctgaccattgaagcttcgggtatcgggatagcctgcggagttgcgcgatgcttcggggtgccggttgtgtttgcgaagaaggcgcaaagcatcaacctcgatggcgatgcgtatgtgactcgcattcagtcgtacacccatgggcgcatcttcgatgtgatcgtgtcgaagaagtatatcggccctgaagatcatatacttatcattgacgatttcttggcgaacggctgcgccctcgacggcctgatcgacatttgccagcatgccggtgcttccatcgagggcattggggtggcgatcgagaaaggttttcaaccagggggtcgatcgttgcgcgaaagaggttttcgtttggaatcgcttgcgatcgtcgaaagcatggatcccgagaccggcgctgtcgaattccgctcgcgaatcaaaccgaaccaattaaggagcaagcatgaccacacgtagaaacgccctgttgctgttcagcaaaccgcctattgcggggcttgtgaaaacgcgtctcaccgtcttgaaggacggcgtgtttcagcctgatgtggcatcgggtttgtatcattgcatgctgttcgatgttgcggaaatctgctgcgacgcgcttgccgagctcgaggcgcgcggtgcaaccgaggagggcgtcatcgacgagtacgagctcgtcatctcgacaacgcctcaaaaaaacgtcgaggtcatgcagcgcattttcgatgagtcgggtacgtggccgcgcggcattcgcatcatttgcgacgaaggatcatcgttcgacgagcattacaaccatgctttcgagcaaacgttcgacatgggcttcgacacgatcctttcgatgggcgccgacatgcccgcgcttccgcgatcggtcgttgtcgagggattcgacaagcttcacgccttatgcgacacgcccggtggcgggatcgtgatatcccccgatcaggaaatgggcgtttccataatcgggtggacgaaggataccgcgatgagccacgatggggtgttctacaacaaggacggcaaaacagtgcttcctgcctacatcgataaggcggcagagctggggttgccggcgctctatcttcctgcggtcgtcgatgtcgatacaatgggcgacctgttccacaacatcacgctcgtgcaggccatcgagtactgcgcgaaattcgacgacctgtcggtgccgtggcgcaccgcgcaggctctccgcgatatcggatattcggaagtgcgcgtgcccccgaacgatctgcacgatccgcgcgaggagatcgacggggcataggggcatggctgcgcccgccgtacggcgggcagctggcaggcggcgcgtgtctacgcggttccgattttcgcgcgatgctcgccgactacatcgcgaaccgatgcgagcccttcggcgagaaacgtttcgaggtcgatcacctgcgctccgatatgggccatatcttcgatgttcgccgcttgtacctcgggcgagcgcgatgaggtgcaatcttcaatgatcaccacgttgtagtccaacgatagcgcgtcgtagcatgacgagcggatgcaattcggggtggtagttccaatgagcaccacggtgccgatgctttcgctgcgaagcgtctggtctacatcggttccgaagaaggcggagaatcggggtttcacgacaacgcgatcgccgtcttgcggcgcaaggggctcgggaaaatcgagcgagtctgccttcgcgcatgccttcgagatgggtttgccgccctcaagccaggtttcgaacctcgtcgattccacatcggatccatcggatgcgtattcgcggcacacgtgaaacacgggaataccgagcctgcgtgcgcatgcaagcgctttcgaacaggcggtaacggttgcttcggcgccggcgacgcacagcgatgaatcgtggtcgatgaatccgttttgcatgtctatgatgagcagggctgcggttcgggggtcgatcatggcttctcctgaattcttcgcttggcgggctttgcgtttgggcggtcgggcgcctgcggtgcgggttggtgcgatccgtcggactgaacggcatcatggctcgtcaggtggtatggcagatggtaaatcggttcttgtcgaaatcgacgatgccctctttgcgcattttcgatagttcggccgacatggcgcttcgatcgaccgaaaggtaatcggcgagttcctgccgattgaagggtattgaaaacgtgttcgactttgcattctcggcttggtcggaaaggtacgagagcagtttttcgcgcgtcgagcgctttgacgtatgctctattttccgggtaagcgtatacgcgcgtttcgccacggaggcgagcagattgcggacgagtctcgtgtggaattcgcaggcagaggtgcacagcgtggtcacccgcctcacatccataagcaagatgacggagtctttcgccgcgatcacgttgagatcgaagggcagttcgggctcgcaggcgtacacttcggcaaacagctgtcccggactgatcgaggcgagaatggtgcgatttccccagtaatcttccttttcaagcctaacggagccttcgaggaccatgcccatggttgtcgtcgtttctccgacgcgaaacagataggcgcccttcttaaacgatttcgtttgcgcattgaggcattgcagcatcgcttcgatctcgttgccgagaattcccttgaaaaggggtgagcgactgattacgggaagatagtcgtccattcatgccttccgttggaaaaacaaccgatatgttggaaacagtatcctatggttttacctaccaggcaagaggtaattcgatggtcggcgggaatccgcatgtcggccgagaggagagataccatgggcgagatgttttgttttcaatgcgagcaaacggcggggtgcgtgggttgcacggggcatgccggggcatgcggtaaagaagccgaaaccgcgcttctacaagacgagctgaccggtgcgctcatcgcgctggccgagatggtgcagcaaaagccaagcgttcgcaccgaggccaccgatgatttggcgatggagtcgctgttcgcgacgctcaccaatgtggatttcgacgatgctgagatcaatcgtttgaccgagtgcgtgcatgccgaaaaagcccgcatggccggtgaggcggagatcgcgagcatccccgactattcgatgctgaagctgtgggatgcacaagaggatgtgcgttcgctcaaatcgcttatcttgttcgggttgcgcggcatggcggcctacgcgtatcatgcggccgtgctcgggcagcgcgacgaatcggtttcggcgttcatctttgaaggtctcgatgctgtagcgaacggcaaaacccaggatgagctgcttcctttggtgctcaaggtgggtgaagtgaacttcacgtgcatggagatgctcgacagggcgaacaccgaagcgttcggcacgcctgagcccaccgaggtcacgatgaaggtcgaagcgggtccgttcatcgtcatcacggggcatgatctgcatgaccttaagctgctgctcgaccagacgcagggcacgggcgtgaacgtgtacacccacggcgagatgcttcccgcacacgcgtatcccgagttcaagaagtacgaaaacctcaagggcaacttcggtaccgcctggcaaaaccagcgcaaggagtttgacaacctgcccgctccgatcttgttcacgacgaactgccttatgccgccggcctcatcgtattccgatcgcgtgtacactaccggcgttgtcgcataccccgaaatgacccatatcggtgccgacaaggatttttccaggctcatcgagcatgcaaaggagttggggggcttcagcgaggagcatgcgttcaccggcatcaacggaggatcaacgctcatgaccgggttcggccacggcacggtgctttcggttgcggatacggtggtcgatgcggtcaagcagggagctatcagccgcttcttcctcgtcggcggttgcgacggcgcacggccgggccgaaactactacaccgatttcgtgcagcaggctcccgatgattcgatcatccttaccctcgcgtgcggcaagtaccgttttaacgaccttgatctcggcaccatcgacggatttccgcgcatcatggacatgggtcagtgcaacgatgcgtacagcgccattcgcgtagcggttgcgcttgccgaagcgttcgaatgcggcgtgaacgatctgccgcttacgctggtgctttcctggtacgagcagaaggcggtctgcatcctgctcacgttgctgcatctgggaatcaaagatatctacctcgggcctacacttcccgcgttcgtgtcgctcggtgttctgaacgtgctcgtcgagagcttcggcatccgcccgatcagcacccctgaagaggatctggctgcgattctggcgtaaccgcctgcgggcgctctaaaggttgtcgcacagcaggaagccggcgaaagtcggcttcccggcttttgggatgaggtagggcctctgccgcgtgcttgcatttttgctgtgcagcgcgagaattccctaacgcgatcgcatcaagatcaagccgctcattaacataataagtcgcattggcaaaagccagagacgaaattatccgtcgataaatcaggattgatgcggctttgcggaacgttttgcgatgacttgggattcggattgctgatcgggagcgtgtcggccctgattaatcgacgggcaaaccgcctgtctgcaaatcggattcgatgccgggcttgggttcgagtcccggaggcccctcgcttcctgtagcccaatcccctcggatgctgtactattcgggttgggggagaatcattgttcgctttcttgcgggaaggcgaactcgatctcatgcgagaggcctatgaaaaacatcagcctgaaaaccatctacctgggtgctttgactgcggtgttcgccgttacgtttttcatgttcgtggcgttcgacattcattcgcagcaagaacaaaccgaagcggcgcttctcgaagaggcgcgaacgttcgcgcgcgagatggatgcggtgtgggagttcatggataactcccagtacaccatcaacaacacatccgatggcatctacgagttcaaaggcttgcactgcgctgtggtgggcaagagcgtcggtacgatcttctcgaaagataacgactatacgattcgctacacgaattacaatccgcgcaattaccagggcgaaccagacgagtacgaacaagaggctctgacggaattcaacgagaatccgaatattaccgagtattacggcattgcggcgttcggcggcgtagagcggttccgctacgttcaggcccttgaagtcgattcgagctgtcttgagtgccatggggatcctgttggagaaatcgacatcacagggcacgagaaggaaggctggacccttgattccgtgggcggggccatcagcattgtcatcccgcttgagcaacagcagcaggttatgcagggaaacgtcattcgcgatgtcgtgtatttcctgctgctcaccacgttgatcggcattgtcgtgtatgcaattaccatgctgttcgtaacgcgcccgcttaatcgtatgaaatccgcttttggcgaaatgcagggcggtacgcttgccgtggcgcttgacgagcggcgctcggccaaagagatcagcctgctcatcatgcggttcaacaccatggccgaagagctgcagggcatctattcgaaccttgaagatcaggtggccgatcgaacggttgatctgcgcgaagcgaacgacgccctcgaacggcaacgtgatgcgctcgagcagctcaacgagaagctcgagcaggaaatgcgattcaaatccgacctgctttccatggtcaatcacgagcttcgcacgcctctgacctctatcatcacgtttgcgcagatagctcgcgagcgcagtcagttgggcgatgaaaccgagcggcattcgtgggaggagatcgagaagaacagccagattcttctgagcatgatcaacaacatgctcgatattgcacgttccgacgcggggagcgtgagggcaacgtgcgaaccgatggacctcggcgacatcgtagcatcggtgcgcacgaccattgcaccgcttgcccgcaagtacgacgtcggcttcggtacgagcgtcgcgcccgacgttccgcttgtaaacggcgattacgagaagacggcgcgcattctcgaaaacctggcgagcaacgcgatcaagttcactcccgacggcgggacgattcgccttatcgtcgaatgcgatgaggatacgggcggcgtgcggattgtgatgcgcgataccggaatcggcattgccgaagaggacaaagagcgcatattcgacaggttcttccaggtcgacagcacgtcgacgcgcaaatacaacggcagcggcctagggctggcgctcgtaagggagtatgccgccttgcagggcttcgccgtttcggtggaaagcgaattgggcaaagggagctcgttcatcatcgagattccccgcgaatcggtgataggagacggcgatgtataaggtgatgctgatcgacgacgaggacaatcttcatgcggccatcaaagagctgttggttgcgaacggttacgagtactgcggtgcgacctgcggggaggagggcctcgccatgctcgggtctgaaaagcccgacttgctgttgcttgatgtgatgctgccggggatcaacggattcgatctgtgccggaagatccgcgacgagggcaggcgcataccggtcatcttcgtttccgcgaagaacgacatcgttgacaagagcatcgggttcaaggcgggcggcgacgattacgtgaccaagccgttcaacgcgacagagctcttgctgcgtatcgaagcgaacatccgccgccataaagacacgatcgaattcgcccattgctgcaaccgcgagggcgtcgcttccattggcgatctcgaagtgcatttcgatgagtaccaggtgttcgtgaagggcaagccggtgcaattgactaccaaggagttcgagatcgtggcgtttttggcgaccaaccccggcaaggtgttcacgcgcagccagattcaggagtacatttggggtgatgccgatgcgaaggacacgaacagcatcacggtgtttgtgcgcaagatccgcgagaagatagaggagaatccctccgagccgaagtatctgctcacggtgcagcgcgtcggatacaagatggccgatgcgctgtagcgggttgtttgcgccggcgtttgcggcggtttgccgccacgcggaatgcttgcaggtcaggatggccgccgcaggtgctttcggtttctcgttaatatcgggttaataactttttaatccaaaacttattttcggttaatcgcaataagcccctcttctcgatagagtttgaccatgggaaaaccaggggaagagttttcctcaaccgatcgctaggatcatccatacctcccccggatgcctggcgggtctaggttgaaagtcggactcgcgacttgagacagaaggagagaacatgcaagacgaaaaaacgcatggactgacacgaaggagcttcatcaagggtgcagcaacgctgacggcagcaggcgcgctcgtcggatgcagccccaaagcggagaacctggaagaggtaaaggagcccgaggcggttgtttcggatgagatctacaccggagtatgcaggtcgaactgtttcggcgggtgcttgctgaacgttcatgtacgggatgggcaggttgtccgtacttcggcgggagattttccaaaccccgagtacaatcgtatctgctcaaagggccttacgcaggtggcccgtgtgtatagtgccgaccggcttcaataccctatgcgccgaacgggcgagcgcggcgcaggggagttcgagcggataacctgggatgaggcgctcgatgagattaccgataaatggaaggcgatcatcgaccaatatggccccaacgcaattgcgacatggatgaactcgggaaattttgggacgtgcacagggggcggttttgccggcataatgccccgtttcggtgcggttatgggattttcttctataaaaggagatattgatgcggcgcagggatttgcggcgacgaagatatacggcgggatgtctgaggctcaagctaacaacgagccgaccgactacgtgaattcgaagacattcatcaactgggcgtcgaacccgaccatctcgcaaccgcagatcgttcactttatgctggacgccaaagaaaacggtaccaagcttattgtgatcgatcccgtttacaacgcaactgccgcgaaagccgattggtacattcccatcaatcctgcaaccgatggtgtcttagccatggcgatactcaatgaaatcatggtggccgggaatgaggatcaggaatttgtgcgctcgcatactgaggcgccgttgctgataaaggaagacggcatgtttttgaggatgagcgatttgggggtggagccaaccgaaggcgataccgatcctcttactggcaagccggccgtcatcgatccttatgtcgtatgggacgaggagtcgggcggagctgtggcgctcgaagaggcgaaagctccgtcgtacaaagaagtcgcgcccattgagggcattgccgttcaaaccgtgtgggacaacgcggctgaaaaggtggctgcctggtctgccgaggtggcatcgcccgtatgcggcgtttcggttgacgacatcaaggaacttgctcggatatacgtggaggaaggacccgtcaacacctatgtgcagctgggggccgaccactatatcaacggtcactataattactggcccatgtacgcgatctctgcggcaacgggaaatattggcaagcctggcgctgcttgcggccctatctgcgtgttgccgaacaattgcatcgatttcatggtgtcggtggctccaaccgacaccgctggcaatcctgcccagggagccggtcccagttataatgccaacagcgttcttgggattgtcgatacgggtaaatttggagatcaggatgccgtgataaaaggggtgtatatcgccaccacgaaccctgcaacggtgtgggctgatcacggaaagaccgtcgatctgctgaacaagatcgaattcatcgtcgttgccgacgtgactatgacggagacggcgatgtatgccgatgtccttctgcccgttgcgcattggttcgaggtaacggatatgcatacgaattgtcacacgcatccctatttcgtatggcaggaaaaagctatcgaacctcaattcgaatcgaagagcgacttcgagatattcaagcttcttgccgaaaagatgggctatggggatttcttcgatttcaacgaagaagagtttattgctatgggcctcgacaacgacggcgcgaaggcgttgggcttaacagtcgatcggctgaaggaagaacgtgctgtccggtttatgcctggagaaacgtacatctcattcgaaggcggcaaattccttaccgcaacggggagggctagcttttacaaggagagcgtagcccctgcatacaacgtcggccaggatatcgatttcagcaaggaaacatgtttgtactgggagccgacccttgaggccgataagagcagcgccgttcgcgcgcagtacccgttccactgcatttcggaacacatgcgcacgcgcactcacagccaatggtacgacgtagactacctcagggagttcgatcccgaaccaattgtccggataaaccccgatgatgcggctgagcttgggatcgtcgagggcgatacggtgagaatgtacaacgatcgcggttcggttgtgatgaaggcgaccgtgaatgccgggtatccgcgcggtatcgtcggaagccctcggagctatcgagagaaagagtttatcgaggggcactttgcgagcctgtcaacgaatcaatacaaccaagtctgcgcaaaccaggcattcaacgatgtcgctgttgcgatcgagaaagcatagggtgatgtaaatgactcgatatggaatggctatcgatcttaatcgctgcttcggttgccaagcatgtgcggcagcttgcaaggtggcgaacaacctcccagcagagctgtcatacaacgtggtttatacgaagacggatagggacttcagcacatttgggactgctgtcgtcaaaggcgccgtcgcaaacgacaatgcgggcggaacgtatcctgattgcacgttaagctaccttcccgtgcaatgccagcattgcgacaatcctgcgtgtttggacgtctgcccgactggagctactcagaaagacgaggagacgggcatcgtaaccgttgacgacgaattgtgcatcgggtgcgaatcgtgcattcaggcttgcccctatgagggagtgcgtaccctgatcaagggacagcccgagtattacctcgatgtggtggtcggagaagctgatgctcctgctcacaagggcggcacggtcgagaaatgcacgttctgcaagaacctgatagatcgcggcgaagtgccggcatgcatgcagctttgccctgggcgtgctcgcttctggggggatctcgacgatcccgagtccgatgtcagcaaagcgatagagggacgcgagttcatccagctgcacgaagaggcaggaacggctccgaaggtatactatcttcagtaaatacgatttgagcaggcagctcagaggttgattctgggctgcctggtaagcggggtgcggaaatggacaaggatctacaattggcaagaaccatagggaaggcggacatgtgcgagcttcttacgcacgcattcgcatatcccgacgataagctcgcacatgctttgctggacgaatcgttcatcggggattgctcgtcttgctttgcggacatcggttgcgatggctggggtgcggaggcactgcctttgccgcatggtgaatcgggtgacggggtgctcgctttcatgcgtaaagaatatacgcggatttaccttagccccgtccgtgttctcgtatatccctatgaaagcgcgtttctccatgttgaatccggtcgcgagggcgttccggtcctcttccgttccgccgttacgctcgacgtcgaagcgcagatgcgcgaggcgggcgtcatgcccaaaaacgcccgcaaagagccgtgcgacagcgtcttccaggaattcgagttcatgtccttcatgtacgggagcctcgccgctgcgatccaagagggcgacgaggcggcttgcgacctctggcagggcagggtcgagcggttcctcgacgagcatgcgctaaaatggatgcccgccttcatggagcggacgatcgaacattcgggcgaggggctctatgcttcgttcgcgaggatcgccctggttttcctcggcatgctttccgaggaagtcgtcgaacgcgagaaggagctcgtatgacgtttctcggagcgctgctgcttgccgtggttttctcggttgcgctgaagaagccgatcaagaagtacccggtgcttttttacgcgatcgccatcgcgatcgacgtgctgttcatctgcaactcgtatatggctttgcctcgcatcgtgtcgagcgccctgttcttgctcgtccacaaatgcacactctcgctcgccctgttcgtcgtcgtgatgtacatcggcgtcttcgcgcgcgagtcgaaggccagggcgtatttgcttcccatccgcgcggaactttccatcattgcgtggatcctctcgctcgggcacatgacggtgtacctcatgtcgtacgtgccgcaggttatgggcggcatcgaccacatgagcggcctcgtgctcgggtcgcttggggtcgcactcgtcttgttcgccctgctgctcgtgctcggcgtgacgtcgttcgcggtcgtgaagcggagcatgaagctgcgcacttggaagcgggtgcagcggctggcgtatccgttctttgggctcgtctacgtccacctgttgctcatgctgcttccgcccgccctcaaaggcggcgaggccgcgcaggtcagcgtggcggtgtattcggtggtcttcatcgggtatgcggtgctgcgtctgtgccgggcggcgaaagacgaagcggattgcagctcggcgcaaatcgaggctctcgacggggcggacctcgcttagccagcccccgcctggccggatcctgcgaaaccgaatcccgcttagccgaatcccgcctggccggatcccacaaaaccggaccctgcttatccggatcccgcttcgcggaagggccccctaggcgtgcgggagcccgcgtctgcggcgctgtgaaaagagatggccgccggggctgtcttgcaacagttccttgcttcgccgccagcaggaatcgccttgcgtccaagcggcttcggagcgccgagttgctgtcgggcgctctgcgaaagcgcttcagcgggggctggtcggtgaaaacgccccgaattgcacactatttcgcgatatgttgcgtttgcggggcttttcgggcggccaagggcctcgaaaacgatgcctgcggcaacgggaaaatgagagcgagtctgtgagcaggcgttatgaaaaggcgagcagcgcctgtattttcgcagcgcaacacttcggcatttagtgtgcaagcgaaagccgattcgccggcgagccgtgtcggcggcggccgatcgtcgcgttccccctaaatatccacgcccagaaactgctttaccgcgatgccgatcacaaacgaaagcgcagccacgccgaggcttatgcccgccatctgcccgaagcgcttcttgaaggggagcccctgcgcaaccgagaggtagtagttgaaggcgacgagaatcaaaagcacgatgacgatcatcgtcgccagcgcccacaggtaatgcgcttcgtcgaacagaaggtagggaaggatcagcagcgctacggtgatgagataggcgacgccggtatagctggcggatttgagggcgtcggagcgcccttcgcttttggacgaaaggtactcgctcgaagccatcgaaagcgttgcagcgattcccgtgataagccccgaaagcgcgatgagcctcgtattctgcatggcgagcgtaagcccggcgagcgtgccggtcatctctaccattgcgtcgttcatgccgagaaccatagaccccacatacgaaagccgctcttcgtcgagcatttcgagcagcgcttgctcatgttctatttcgtcggctcggatctccattgcctcgggcacttcgacggcgagtttctcgtaggcgtcttttgcattgttttcgccgttttccatcagcttgacggcgaaggtgaatccaaatatgcgtgcgatggcggtatggaacagcactttgcgcttctcgggtctcatctcctcgtcggtgtagtgctgccaccgctttgcatggtaagactcttcttgcgatatgcgcgagagtgcgtcgcggtttcgcgcgtctttcgtgcgcgctgcaatgcggcgatagatttccgcttcggtcacttccccttgctggaaaacccgtatctgagcaagcgcttcaggtgaaatcgaaggctttgcagattcggtgctgctgtcggacatggtgcgctcctcgtgtaggtgccaggctcaactgcataggataacgcgttcggccgtcggtcgaccgcgttgtttacgattcgtcccgaaatggctttggggctcggcggccgtcggtgcattgggcggcgtacgcgtacgggagcgcttcaagcgccttcgcgcgtcggcgccgccccgtcagttcgaccgggcggcgccgacaaggatggccgagcgctatcggagccgatgtccggcaagtcgggcatcggacgagtcgatggctactcgatgccgagtgcgtgatgcgcggcgatgtaggccatcgtgccgccggggcacagcgttgcgccgccgccgaggtaggcgccgcctgcgatggaggccgtgcagttgccgcaggcgtacagaccgccgataacctcgccgtcgttgttgataacctgggcgttctcgttgatcttgacgccgccgcaggtgccggtcatggcgggcaggtacaccgctccgtagaacgggcccttctcgatggggccgatcatctggtttgccaggtcgggacggtcgatgtttttgagccacgcgctcttgctcgactctttttcgccacgatggtagtcttcgtcaacgccggtttgcgcatacccgttgaacttggcgacttccgcaacaaggccttctctgtcgatgccgagtttgtcggcaagctcttcgatggtgtcggcggatacgaaccacgaattttcgccctcgtccatgctgggaaggttgtaggtttcggtataggttgaatcgcagatgaaataggcgggaacattctcgtaggtgagcgtgtcggagctgaagttctgcatgctcatgttgtatacgggatacgtcgccgactcgtcgccgaaacgatgccctcggccgttgacgatcatgctgttcgggtagccgcgatagcggttgaagtcgttgcccttgatatcgaattgcactgatgccgagggatcgaacgcatcaggttttccggggaagaagttcggcatggcccagatgaagctcatcaacccgagtttggcgttgattcggccggcagcgcgatgcccgtcgccggtgttggtctgcgcggcgttcgaatagaagatgggcgcgggaaggttctcgcgcgtcatctcggggtcatgatcgaatccgccggtgccgagcagcaccgctccggctttgatgttgacctccttgcttccctgcgtcgccttgacgccgatcacgttgccctctgcatcggtgtagaactcgctcaaggcggtgcccatgagtatctcgcatccgcgctcctgcagcttcgcctggatcgcgttccagatatcgcccgctttgccgctcttcaccttcgagttgcggccgtaattgagaaatccctcgacgttgtcgtagtagtcgtgcgcgccgccaacggcgaattcgacgccggtggtgtcgctcagccacgacatcatcacgtgtgcggtatccacgaacgcttcaacggtcgccttgtcggtacggccgccgccgcatccctcgatataggagatcgcttcctcgcggctgtcggtcacgtcgacatcggcttgccatttgttcatgggcgtccagaagccgccgcctgaggtggtggaggttccgccgaagagcgcatcggatttttcgatgagcataaccgatttgccctcggcgtcggttgcggcgagggcgccgatggcggcagtgcccgatcccacgatcaggaagtccacctcgtgatcccaggatgcaggcgccgaagaaccgctctccgcgctcgcctcccccgatgctgccggcgagcatgcggcaaggcccatgctcgcgcaggccatgcccgctccgacgataaacgccctgcggctcagtccgctcgcttggcgcttcgatgctgtttggttgttggtacgcatcccttttctccttcgtatcgtttgcatgcggttgacggatcggcgtcggatgcaataggatcgatgttcgcaaaagcaacctgagaaactgctttccgatcgcgcatccgagcgccaatccgccgtggtatgagcgtgccatggcgcaatgcgggctgccatcgcacgcatcatgcgaaatgtcggcggcgtgcgtgtcatccatttcgagtgagggactttcatgaggggttttcctgtaggatcgcaaaaatcattcggtttcgcttcgcttgttcccatcgggctcatctcattcgcgctcacgcgcgtatggatgacgcttgccatcaacctccatatcacgatcggcccgtcggccgacgccgttgccgccattcaggccctcgtgaccataaccatcgttgcccggttcctcaccgacgccgtgctcgttgccttgggaagcagaatctcatcgctcgcatcgcatgccacggttgtcgccgccgtgcccatagccctctcgttcggcaccttgttcgtcacgtgcgccgccaacggatggatcgacagctttgcgctgcttgccatcggcgctgttttctgcggcgtgggcatcgaggccttctggcttttatggagcgagctgttcgtcaagatggatttcgatgcagtgaaaacgatcatattggccaagatcggcatcgacgccgtatgcgcgcttgctttgaactccatccccttcgacgttgcttttgtaatgttgatcgtcgtgccgctgatctgcctggccggatataggctagcttggtcgcttcgaaggagcgagagcgcttccggtcaggcaaaaccgtggaggaacatatcgcttgggcaattcgcgccgatcggcatcggtgttatgcttctgtgtttcggattcaacttctcccaatcggggttccaagacgcgctctcgggaatcgacaattcgtatacgctgggcatttgggtgtctattctggggcggttcgtcacgttcgccgtgatggccgttgcgctgaaattcatgaaagattaccacttcgaggtactgttccgcgcatcgatcctcattgccgcgattggctttctttccctcatcctcccgttcgaggggaggttcgcgtgtttttgcgtcgccgtgatcgttgcgtcgttcattgcggaaaacgccatcacgttgcttaccgtgtatgcggcgaagcatgcgacgaattcgccggtgcaaatccttgcctggggtcagttggcgcttcgcgcgggaggcctgtgcggcgttatcgccggaaatgcgattgcgctcaccatgtcggcgggcgtgcatgaagaggtgctgccgtatttggtgtcgctcgaggtgctgctgctcaccttcgccgccatgtacttcattcgcgagcagagcgtcaacaagtttttgtgggaagtcgtccccgaatcgtctgacgaggaaagctccgatgctgcagcgccttatacgacggcgcagcttgccggttcgtatgggctgacgcagcgcgaacaggaagtgctgggattgctgctgaaaggtcgcagcatcccctatatcaaggagacgctctacatcagcacgaacaccgccaaaacccacgtgcggcatatctaccagaaaatggggatccatgagaggcaggaactcataacgctcgccaacacgtttcgcggcaaatagggcgggtttcttccaggcgcgctatactcgtagttgaacatgatatgcaggcggcggcgatcgccgtgcgcgtgcgcacccgcgttcaatgggaggagccagggcgctacgcagggatgaccgaccaacgcgcacgttcgcgcccgcgttcgaacggatgctaaaggcgatgctgaccggcaggcggatcgcgcgtgcatgcaattgcaccgcagatgagggccgagatgcggctctcgcaaagacaggagcacgatatgacagagcaggatcatgcggatttcagcgatttcgttgcaaccatcgccgcgcttcgcgcgcctgacggctgcccgtgggatcgcgagcagacgcacgggagcatcgcgaagaacatgatcgaagaagcatacgaggcggtcgacgcaatcgaggcgaacgatatcgtccatctgcgcgaagagctcggcgacgtgctcttgcaggtggtgctgcaaagccagatcgctgccgatgcgggcgagttcaccatcgacgatgtctgccgcgatgtgaacgccaagatggttcgccgtcatccgcacgtgttcgggagggcgaaagccgagagcgcgggcgacgtgctcgccttgtgggataccgtcaaactcgctgaaaagggcgacgccgatgcgcaggccgaaagcacaggcgccgagcgcgaaggcctgctcgacagcgtgccaacggcatttcccgcgcttatgcaagcccagaagatttcgcgtaaagcggtttcggcgggcttcgagtgggatacggtcgaagaggtgtgggccaaggtcgccgaggaagtgggcgagctgcgcgaagcgttcgatgccgcgccgaaaacggataaaggcacggtcgccgaaaccgccgaggccgtcgtggagctcgaattcggagacgtgctgttcaccttggtgaacgttgctcgcaaaatgggcatcgatgccgagagcgcgctgcgggccagctgcggcaaatttcgaaaccgctggtcgtttatcgagggggccgcatgggcccaggggcgcaaggtcgaagagctttcgatggacgagatgcaggctttgtgggataaggcgaaagagcgcgaaagggaatagccaaccggcggttgattgcccgactgtcgcaagtgtttgtatagcgaacggcctcgatgagcggtatcatataaaacctatttagtcagcgttgcaaacgcagagacgaggaggcgctcgataccggtgggtgacccatatgcacacggggcaaagcgactcaaaaagccgtttgccgaacaggttgcggcggcttctcgcaacgatgcgattacggggctctacgatgccgacggctttgccgatacggtgcgtcgtctgctcgaagagaacccgcagaccgagttcatcatcgtctacggcgatctggatcggttcaaggtcttcaacgatctgtacggagcaaaggcaggcgacgatttgctcgcggccgtcggcaggatgatcgccgacaggctgcccgagcacgccgtgtcggcccgcctgcgcgccgatcactttgtttgctgcatgcccaaggaatcgttcgatcccgtcttgttcctcgccgaactcgatgtttggcttgccgcctaccccgtcgacttcgcctttttcgtgcgcttgggcatctatgcgatcgatgatcccgcactcgatgtcgcgcgcatgtgcgatcgggcgcttctcgccctgcacgaagcgaagaaaggagccggcgcaagcagctgcgcgcgctacgacgacagtttgcgcgacacgctgctcaaggagcaggagatggtgggggatatggcgaacgctttggaacaagggcagttcggtccgtttttccaaccccagtaccgttattccgacggatcgatagtcggggccgaggttttggcgcggtggaagcaccctgtgagaggcttggtgggccccggcgagttcattcccatattcgaacgcaacggccttgtcgcgaagctcgatttctatctgtgggaagcggcttgcaaggcgctgcgctcgtggctcgacgacaagacgatagagcgggtgcctcccttggcggtgaacatatcgcgcgtcgacatctaccgcgacgacctatgcgattttctcaaattgctggtcaagcgctacgatatcgctccggatctgcttcacctcgaaataaccgagagcgcatacatggaggcgcccgaacagctgatcggcgttgtcgccgagctgcgcgaagccggtttcagcgttgccatggacgatttcggcagcgggtactcttcgctcaacacgctcaacgacgtgccggtcgatgtcctcaagctcgatatgggcttccttgaggcacgcaacgatacgcgcggcggcatcatcctcgcttcgatcgtccgcatggcccgctggctcgatctgcccgttatcgccgagggcgtggaaacgcaatatcaggccgattacctggcgggaatcggatgcgatgtcatgcaggggtacttgttcgccaagccgcttgatcgcgatgattacgagagtctgctggtcgggcaatcgagcggagccgccggcccgcatatgggagaagaggttgaagacgtcatacccgatgtgtgggatgccgattcccattttgcgcttctgttcaacaggttcgtggggcctgccgtgttggcggaatacagccttgccaaccaaaatcttgaaatcatcagaggaaacgatgcgtttcgcagctggttcagcggacggttcaccgagaaggtggggtggagcgtccggttcctcaccgagctttccgacggcgatcgcatggcggccgaagcaacgatagagcaggttgctcgcagcggcgagagcggcgaatgcgaggtgagggtttgcggcgaaggcggcgagaaggcgtgggtccgcattcgcgtgcgggcgctggcccggacgtcggatgtgtgctcgctgttcctgcagttcgagcaaacgtccgaaccgcaggtgctgcgggatcggctgcgggcgaccatcgacagcattcccggcggcatactgttcctcgagatcggcaggggttcggcgaagctgctcgacttcagcgacgctgcagcggagatgtccgattgcacgcgggaggaattcgaagaggctgcgcagcccgatgtgaggagcatcgtcgtcaagcgggaccgaaaattcatcgaagccggcatcgatgacatgcgaaatggctccgatcggtttgcatgcacggttcgcatttacgggaagaagggcggcatccgctgggtgcatgtatcctcttctgtcatgtaccgcgatgaggaaacgctctgcatcgcggcggtcctcatcgacgtcacgaaagacaaagaggtacagcagcgggtgaagttgcaggcggcaacccagatgcgtctatacgatgccatgccctgcggcatcttgcgctatgccgccgaaggctctctcaagctggtttcgatcaaccgcacgggatgcgagatgttcgggtgcgccaacagcgacgagttcttcgaaatggtgggcgacgacgtgttcgggccgctcgcgccggaaagcaaagacgatcagctcgccgccctcgaagaactcaagcgcggcacctcgtccatcatgccgttcgaatgcagggcaatgcgcaaagacggatcgatgatctggatcgagggctattcctcgctgaccgaaggcgaggacggaacaccgcttgttcaagctgcgttcaacgatgtatcacatcaacggctcgaggagcatgagcgcgacatgcggcgctactcttcggtgctgtgctcggtgtacgacgaggttctcgaatacgattgcgtgcagaacacgtgccgcgtcgtgtactccgcgcacaggccatcggcgaatgccgaacccatcccgatgaagctggcgatcgagcgatggtcgaagcacattcccgaaaaatcggatcgggacaagctgcgcgccgccctcgaggcctgttcgggcacctctgggcgggagccgttcgtgtgctcgtaccgtctgatggcagggggtaaggccgtttggtgccaatcgacgttcctgcgcgtttcggatgatttcgtgctgtggtgcaacaaagacgtgagcgaacacgtatcggccgaagatcgccgcatgatcgcgcgcgtttccgatatcgtcggcaagctgccggtcggcatcggcgtctaccgctacaccgacgagggcgtgtatcctttttacgtgagcgatctcatgtgctcgatgttcggtcgcgagcgatccgaatacaacgagatcatcgaaacgggttcggccctatcggtgctgccggtattcttggacgcgggcggcgggatcgccatcggggatatcgtgcaaaacggcatcgacgtcgaacttgaaacgaagcgtctcgacggtacgtcgatcaacgtccacgtgcaaggccgtgcggtgcgcgaaggcgagggcttcgaggcgggcgacggcgagggcgtgttcatctacgtcgtcgcaaccgacgtcaccgaagcggttcgcgagcgccgcgctgcggcgtggctcaacgagcgctatcggattctcagcgaaatgacccatgcgatcagcttcgactacgatttcgagagcgataccgtgtacttctacatcgatcgcaccggaagcgggatggaggcgcaggtcataccccgttactttgagaccttgtccaaatcgcgctgcggcgttgtccatcccgacagcatcgataccgtgcatgcgatgttcgaacgggtgcgcaacggcgcggaaagcggcgccatcgaataccaggccgattactacggtcgcggttacgagtggtatcgcaccaatctgttcgtggtgagcgacgatgccggatcgcgccacttggtgggattgatcgaaagcatccaaaacgaattcgttttgcgccgccgcgcggagctcgatgaaacgactgggcttaccaaccacgctacggcgaaggacctcgtcaaccttgccctgtccgattcgcaggttcgcggatcgagcgtttgcgccgttctcgacatcgacgatttcaagctggtgaacgatacgtgcggccatatcgagggcgatgcgctgctccatgaagtgggtacggtgctcatttcgagcttccgcgaaagcgatattctcggacgcgtaggcggcgacgagttcatgctgctgctcaagaacatcgaactcgaagacgccctgagcaagttgcggggtgtggcggatcgcatctcggagtatgtgttgcccaagctggatgcatcgccctccttgagcatcggagtatacgcgatcggcgaagacgatctgacgtaccgcgatgcgttcgtgaaggcggatgacgctctgtaccgcgcaaaacgggctggcaagaatcgcatcgtggtgtatcagcccaactgcatgccggagtgatgcccaaacgccgcaagctcccgacaaacctaaagatttgctgacaattgggccgagggcaagcttggagcgccgatacttcggtatgctggagcgtactgacgcacatgcgtgcacggatgcgatccgtgccaccgtataacgataggcgggttacatgggaaatacggtatcggccgagccggagcttgaccttgcggtagccgaaggaagcgagatcctcaaatcgcgcaacctgacgatcgacgacatcaagaggatgcgcgatctcgaaagcgcaacgcgcggcatcatgcagaaataccacgcggcgatgcgtcagatggaggtgcgcttcgaaatcatcgacgctgacctgagtgcaaggcagaaccgcaaccccatacaccacgtcgagtcgcggctcaaaaaaccggcgagcatatttgaaaagctgcagcgctacggcaggcagacgaccatcgaagatatggaagcctacatcatggacatcgcgggcatccgcgtcatctgctcttacatcagcgatgtctacaaactgctcgatctcatcaaacggcaggacgatttgacgctcgtcacggtcaaagattacatctccgagccgaagcccaacggatatcgaagccttcacatcatcgtgaaggtacccgtgtacttcctcgacaagaaggaggaagtgccggtagaggttcagttccgcaccattgcgatggatttctgggcgagcctcgaacacgatctcaagtacaaggccgtgcgcgccatcgaaggaatcgattcgttcgacgagctgaaggattgcagccatatcatcgaggatgtggaagcacgcatgcagatccttgccaaagcgctcgaggttgaggaataggtctctcccgcatcggcggagcgggcgtgcggacgctccggtcccgtcatgggatgacggaatgctgtgttggaaatacaacagacggcatcacggcttgctggtaccgtatctcgaaaacaacctgggagcgtcaggagcggataatggctaaggaaatgagaaccgtcattgcgatcgacgaggatcgctgcaacggttgcgggctgtgcgtgagggcgtgccacgagggcgcgattgcgcttgtcgacggcaaggcgaagcttatgttcgagcactattgcgacggactcggcgactgcttgccctcgtgccctgcggatgccatctcgttcatcgagcgcatggcggcaccgtacgacgaagccgctgtcgctgcggcccaggcggccgccgcatcggctgcccagggcagtggctcggcgcagcacggcggatgtccgggggctgccgcaaaatcgttctcgctccatgcgccatccgaggcgccgcatggggcctcgcccgaaaatgcggcgagcgagcttcgccagtggcccgtgcagatcaagctcgtctcgcctgccgcgccgtatttcgcgggcgcggatttgctcgttgcggccgattgcaccgcttttgcctacggtgccttccaccgtgatttcatggctggcagggtgacgctcgtcggctgtccgaagctcgatgcgatcgattacgccgataagctgaccgagatcgtagcgggaaacgatatctcgtcggttacggtggctcgcatgagcgtgccatgctgcggcggcatcgagagggctgctcgcgaggccgtggctgcaagcggcaaagcgatacctctttccgtgcgcaccataggaacggacgggatgctgctcgattagccccgcgtgtcttcgccgtctttacgtttctcgctgcaagcagaagttgaagcagcgcgattcttctcccaaaaaaacggcaaacggtatcattgcatcgaatgataatgtccatgctcgcatagggggaaatgcggggcgccgcaggataggcgctccgtttgcagacgccatgagaaaacgcatctacgagatcgtgcagcgcgcccagcctggggatgcgctcagccgcgcctacgatgtattcatcgtcgtcgtggcgttcgtcagcttgattcccctgatgttcaaagagcaggatggcgtgctgacgatgctcgacgtggtaacggtctacatcctgttcttcgattacgttctgcggtggatgacgcatgatctcaagacggggcaagggggctggaagacgttcgcgaagtatccgttcacgccgctcgccatcgtcgatctgctcgccatcctcccgtcgctcggcgtgcttccgcaaacgttcaggttcctgcgcgtattgcgcgttgcgaagatattccggtattccaaaaaccttatgatcgtgggaaacgtgttcaaggcggagcgcaagacgctgctatccgtgctcgtcgtagccatcgcctacatcttcgtgtcgggactcatcatgttcgtcaacgaacccgatacgttcgagcattttttcgaggcgctgtactgggcgacgacggcgctcacgacggtcggctatggcgacgtgtcgcccatgaccgatctggggcggggaatctcgatggcgtcttccctgttcggcatcgccgtcattgcgcttccggccggcattataaccggcggataccttgaagaaatccggaaaagccaggcggatcatgcggcgtacttccattcggcgataccgggccgctacaaaggaaagcctctgcatgcctatattaacgtgggggagtatgcgagggcgcatcctaaggtcatgtactacctgaaaatcatggcactcggcgttgcgctcgatatcgttttgtacgatctcgtttcatggctcggactgccgctctggctcgatacggcaggcaccgccctcgtcgccgttgtgctcgagcccgccgccgcgctcatcgtcggcttcatcgataatctgtatttggcgatcgtgtttcagaatgcgggcaaccttctgtacttcgccctgtcggcgatcgtcgctttggtctatggtattcttttcgccaaaggcagaaagattacgggacgctcgatcgggttcgccgtgctgttccttgttgtggcgagcgcagctatctcgacgcttctgagctacgcgttcgacggcggcgtccccacgcttgcgggtacggtgaactactgggagattctcgtggagtggggcgttcccgccccgcttgcctgcttcttcgcgatcgctttggacaagcttgtcgattccatcggcgtattcgcgatcgttatgggagcggcccgtctcttcaagccgaggacattcgcttcggacgacgcgcagggccttccgagcgtggaattgaaagacggggcagccgtggtgcattgcatacctgaagcgcctatcgagacagacgaggatatggttctcggcatcgatgtgggcggaacgtcgacgaagatcggcatcttcaccgtaagcgggacgttgctttcccgccacgcgtttccgacggtagccgttcgggccgacggatctttcgcgaagcttgacgagggatacgatgcggtgctttcgcgcatcggcgtagaatcgagcagaatcgtttcgatcggcttggcggttcccggcatgatagctgcggaagactcgctgaggctctgcccgaacgtcgatctcgatctgcgggcgtacaaatcgtatctgcgcgtacggttcgcccgcgcttcggttcacgtgatgaacgatgccgacgccgcagtgctcggcgacatgtggaagggaagcgctgcggagcgcggagccaccacattcgcgctgctgacactgggtacgggcgtcggtgccggggttgtcgtgaacggcaagctgatttccggcaacaacggggcggtgggcgaaatcgggcatctgtgcgtcgatcctgcgagcgatgtcgcctgcgggtgcggaaggacggggtgtcttgagcagttcgcctcggcgggggcccttgtgcggatggcgaccgagtatgcaagcgatgggcggggcggctacgagagcgcgaaagacgtgttcgatgccgcaggggccggcgacaaggcggcccgtgccgcgattgaacggttcgccgaccgactggctttcgggctttcccagatggcatgtttgctcgatcccgaactgttcgttctcgggggcggtctgtcggtttctgcggaggcgttcatcggagtcgtgcgcgagcgctacaggggctatgcgctcgaggtttgccgttcgacgcctatcgtcgcttccgctttgggcaacgattgcggcatgtacggtgcggcgtatcgggcgatgaagaagctcggccctgcgggatagggcagcttgttttacggaaaatcggtcgtcttgcaaggcgtcgcccgtcttgcagtgcgaattcggtcatatggggtaaagccgatcgaacgggatggacgcaagccggatgaagctttgggaacggtgccgtacggcaagcccgtcggtccatattgtgcagggggcttattcgcgcagatatcttgctgcgaacctattcatgcaaaccgccgcctccgtattctttttcgacgtgtggaaagtgaatattttttatcgatatacaataattgacgtgtcgtggggcaccctctattccaattgatgaggcattagcgtttatattttgtgcacttgaacaaaaatagtgccaaaagtgatcaaaaacgttcgtaaaaaaatcttgcacgtgaacaaaaatatttcttgcacttgcacaaaaatgatggtataccataggcaagggcaaaactggcatagaaaacgtcacggaggaatcggggattccacaagcacggcagagtccctttgcgtgttcctgcagccgcggcacttatgctgggaagctgcatcaggtagtgcgccacttacacatttggaaggcgtcgccttccagaaaggagactgtcatggcgaagatagtcaactcttggaacgactgggatccgttgaagcgcgttattgtcggccgttgcgacaattctatgattccccccgaggagcccgcgacttccgagaaggttcccgttgattccgagatgcgcggcatgtggggcctccgtccgctcgcaaccgtcgagcgcggcaacgaatgcctcgagaacctcgtcaagatccttgagagccgcggcgttcaggtagaccgcccgactccgctccagtggaaccaggccatcggcactcccgatttccgcaacgactccatgatgacctgcatgcctccccgtgacattctgcttaccatcggaaacgagatcatggcttctgcgaactccttccgttgccgttatttcgagtatctggcttactggccgctcatgaagcagtacttcgacgaggatccccaattcaagtggacccaggctccccgtccgcgcctgaccgacgcttcctacaagcacaactactacgacgagaagatctcgctcgaagagcgcctcatccgcacggccaataaagacttcgtcaccaccgaagtcgagccgatgtgggatgccgccgatgtgatgcgcatgggcaaggacctgttcatccagcacggccttaccaccaaccgcaccgctatggaatggttccagcgttactaccccgatctgcgcgtccatgccgtgaatttccccggcgacccgtatccgatccacatcgacgccaccttcgtgccgcttcgtccgggcctgatcatcaacaacccggttcgccacctgcccgaagagcagcgcgctatcttcgaggccaacgattggcagatcgtcgatgctgctcagccggctcacgacgagccgccggcgctgtgctacagctcggtgtggctgtccatgaactgcctcgtgctcgacccgaagaccgttatcgtcgaggcttccgaagtgtatcagcaggagcagatggacaagctcggcatgaacgtcatcccctgcgacctgcgtgacgcctatccgttcggcggcggcctgcactgctccaccgccgatgtctaccgcgaaggcggctgcgaggattacttcccgaaccgcgtcaaggattcgacgctcatccatccggagatgtggaacgactaagttctcgcaacccgctcgttttactgctactaccgattcaagaccagtcgatagaaagggggtttggtcgcttaagcgaaccaaacccccgtttgttttggggcataccaccccttaggtcgttgcatgcttaaacccatcgcatgccgaaggcgaggcggcttttcgcacgacttggcctcgatttcgccctgcgatgggcagcgcctcccgtgctgcgcatccgacgaccgccctcatttccctgctactggttaaggaggaccaatggcggataacaatgatctcaaccccatggggacagagaagaaaaacgggaacggcaaagacggatccggcggatacaagatgagggtgggcttcggtaccatcgccatgctgatctctgccacgggcatgggcctcgtaccgctgttcagccgttgggctacgcgcaccgatatgttcgacggtacggcggggttcaacgccggagacagcatcggggcgctcatggcggtcggacgcatgggcatgggcgtcatattcttcgtgatcctgcttcttgccacccataaagtgcatgtattcaagaagctcaaactaacgcccgccatagcgctcggcggcctcatgatcggtctgtcgcttgcgtgctacgtgacgtcgacgcttttgaccacggtgtcgaatgcggtgctcttcatctacatcggtcctgtcatctgcgttctgctggcgcgaatcttccgcaaggagcccatgtcgaagctgcagtgggtttgcttgcttgcggtgttcatcggcatgctgttcggcaacaacctcatgggattcaatgaaagcggctttttcatcgatttcaatctgcaaacgtcgacgcccgaattccccatgaagggaatcggcgatatgttcggcctcgcatccggcgtgttctacggcgcgtccatgttcttcaacggctaccgcaaagacgccgacaccacggcccgcggcgtatggaattttatcttcgcagtagtcggcgccggcgccgtgaccatcatcctcaactcgctcggctcgtcgccggatatggcgaactgggctctcaatgtgcacttcacgccgtttaactgggccggcgccgttcttctgtggatcatctgcgggcccatcgccctcgggttcttgctggttgccgggcgcaatcttcccgcagccgactacgggaccatcgcgtattgggaggtccccgtcgcgatcttcgtcgggctcgtcgtcttcggcgaggcgcttaccgtcaacacgattatcggcggcatactcattatcggaggcggcgccgtgccctctatcaaaggcatgattgcggggcgcaagctcaagcagcaggaggaaatcagccaaaagcttgccgcccatcttgaagaggaagaaagcaaagaagggttgagctagattctgcgatacgcactcggccgcgtgttcctgcttacggtgaacgagataacgaagcgcaggcgagcagccgaccgacgggacggttggctgctcggcagaatagcgtggaggttgtcgggcggttgaggcgttttatgtatgctcggatgagcagaaagaggtgtggcacatgaagatgacgaacaatctgacccacattgctaccgaggtcgagttcgaagctgcaatgagcgaagaggagcttgcctgcgtgttcgagcggctgggcattcccggctttcccgcagagctcgacattgcggagcgcacggaagatcacgtgcagatgatgtcgctcgaatcgctgcttgcgtttgcgaaggcgaacggcgcgggggcggttgcctacgacgtgacgtacttcccgcatgcggacgacgaagaggttgcttaccagctcaagcagctggcccgcgatttggagatcagcgccgaagtcattcgcgacgtgtgcgcagatgagatcaaggagtatctggcgctcgacaagaagcgcaacgccgatcttcccgtgcacagcatcgtggaggcgtatgtcggcggaaccgcgttcgcctggtacggcatgaatgattacccgcggctgaagcgcgtcatcttgagcaagctcgccaagggcggccagaaggcgaagcgttcgttcatcgaccgcgtgagcagggcgcaagtcgagctgctcgaagattactgattgtttacaaggtaggtctactgactgcacatattgttacatgatgacgagaatcttagtttttaggggtattatgctctagaggcaaggctatccattcccgtcttggaaggagggcttcacatgaactacgcgtttcgcggaaggttccgcgcgcacatgaacgaggccgcacatttcttaggggattatcatgaatgctgaaaaaaccatggcaaccgagccgtcgctgcgcgaattttccgaagaagagaagcacagaacgctcaagaaggttacgttctcgtcgtttctcgggaatttcatcgaatggttcgattatgcgagctactcgtatctggcaacggttatcgcgcttgtcttctttccgggcgaagaccgcttggtttcggttatgagcaccttcgccgttttcgccctttcgtttctcgtgaggcccatcggtgcgatcttctggggcaacatgggcgataagagaggccgcaagtgggctttgtccatttcgatcctcatgatgagcggggcgacgtttctcattggctgcctgcccggttacgcggtcctcggcgtcggcgcgccgatccttttgctggtgctgcgcatggtgcagagcttctctgcagcaggcgagtacgccggtgcggccaccttcattgccgaatacgcgccaaagaaccatcgcggcttctactgctcgatggttcccgcttcgacggcgacgggcctgctcgtgggttctctgttcgccactttcatgttcaacgtatggggcgccgaatcgtcgttcgtggtcgattggggctggcgcattccgtttcttttggctttgccgcttggctacatcacccactacatccgaacgcatctcgaggattcgccggtgtacgaggagatgcagcgcaatctgaagcgcatgggttcaagcgtgaagaagcccatccgcacgctgttcaagaagcatttccgcgtgttggtcgtttcgttcggcgcctgcgtgctcaatgcggtcgggttctacgccgtgctcacgtatttgccgaactaccttgaaacgacgctgagctacgatgcgagcttggcctccgtcatcaccactgtcgtgttggtggtctacatcggcttcattttcctttcggggcgcatatccgatcatttcggacgcaagaagatgctgattatcgcatgcgttggcttcatcgtgtgcaccataccggcattcatgctgttgggaaccaagaacttttggatcatcctcatggtcgagcttatcatgtgcttgctgctgaccatcaatgacggcaccctgtcaagctacctgaccgagacgtttcccaccgatgttcgttattcgggattcgccttgagtttcaatttggccaatgccatcttcggcggatccgcttcgtacatctcgttctggctgatcgacgccacgggcaacgatatcgcaccggcgttctatatggtgttcatcgccgtgctcgctctggtggcaatgatcatgtcgcacgagcatacgggcaaggatttgtcggaagtgtagggccggcctgctggctatcgaaggattcgagcggctgcatcgtttgctttgcttgcagccgtcggttgttgccccgcatgccctttgggctgcggggcgatctgccgtataatagggagaaatacatgtgcgggcagcggagcgaacagagcgggactgtccgatgggagggcgtatgggcgagacgtcgcaaacaccgaaatctctgaaggcgcaaatcacgcgtgcatcgctggtgctggcggcggcggcgcttctgcgcgaagaggggccgagcgccgtaacgtatagaagggttgccaagtgggcgggcgccgcctcgtcgtcggtcggatactacttcgattcggtgacggagcttttgcaggaagcaggccagcacaatatccaaatgtgggcgcagcgcgccgaacgtgcggccgaggcggccgaaaaactcactcccgaagaatgccgcaagaattgcgtcgatctgctgatcaaggcatgcttgcccgaggattcaaccgtgccggcagcgcactacgcccagctgatcgcggcagccgaatcggaagcggtcacgaaagcctaccagcggggcaggcaggctctcgatgcggcggtgcagcgcattctcgatcgggcgagcgtgtcgatgtcgccgaggcttgtctacgccatcgtcgacggcgccgccgtcgcggcgatatccgagggctacgatgtgcacgacaccgcagcaacgctgctcgccgaagtcattgccgactatatgaagtaggcgtactgcggcctgctcgacgtcattttggcccgacgatgcgcttgcattgcccaattcgtttcccatgcgataattcggacggcgttttccttatcgcggttcttcccgttgcgcttctcgcgcaatctcccccttacggcagacgattcgacggtttcggcggcgaacggtcgctaatgctatgctggcggcatcaaatatgcggcggacggttgaacctataacctcgggactcaacgattacagctgagtttcacggagcttccgagacggtcacgggtcgaccacgcgagggttaacgatctcctgtagctcttgcatgcaatttctcagatggtagaacgggtaagaacctaaattcgtgtgcgcccatgcaggcgcgcacccgtctgagaaaggagatgatgagcatgagcaaatcgagcggaccatccacgtcgtcggaaagcgcccccatcggtgcagtcggcaagccgagcttcaagcgcagcctgagcttcttcggcttcttcgccatcaccgcttcaatggttatgacggtgtacgagtatccctcgttcgcctcgtcgggattccaattggttttcttcctgattatcggcggcctgctatggttccttccggttgccttgtgcgctgccgagatggcaacggtgaaggggtgggagtccgggggcattttcgcctgggtcggcaacacgctcggcaaacgctggggcttcgccgcgctgttcttccagtggttccagattaccgtcggcttcgtgaccatgtcgtttttcgttttggccgcattggcctacgtgttcaaatgggacgcgctctacaataacccgctcgtcatgttcatcggcgttgccatcatagtatgggcgttgacgtttacgcagctcggcggtacgaaattcaccgcgcgcatttcgaaggtcggcttcttgggtggcattctgcttccagccgcgattctgttcgtcggcttggccgcctattttctgactggcggtgcgtcccagataacgatggactttcacacgcttatccccgatttcagcaaggtggatacgcttgtgatattcgcatcgttcatcttggcgtacatgggagtagaggcgagcgcttcgcatatcaacgagctgaagaatccgacgcgcaactacccgctcgccatgatcatcctcgtcgttatgacgattgcgcttgacgcgctcggcgggctggccgttgcgaccacgcttcccgccgaaacgctcgacagcaatctttcgttcggcgttatcgaggcgttcaaggcgatcttcgtaacgcacctgggtgcggaatggggatggctcgtctacgttgtcgccgtgctgcttgcactcggcgtgctcgccgagatctccgcgtggatcgtcggtccgtcgcgtgcgctgctcgataccgcgcacgagggcattcttcctcccacgttcaagaaggtcaacaagcacggcgtgtctgtgaagacggtcgttatccaggcggtcatcgtaaccgtatgggatgctgtgctctgcggatcgatcgccctttcgggcggatcgagctcgtcggtcggatatctgaccgccatcgggcttaccgttgtcatctacctcgtgggatacgtgctgttcttcctcggctacttcgtattggtcttcaagaagaaggatctgccgcgcaagttccagcttcccggcggcacgccgttcaaggctatcttcgccggcatcggcatggtcgtgacgattgcgacgctcgtcatctccttcttcccctcttcggagctgacgccgcaggcgaacatggtttatcagaccacgttgttcgtgtgcttcgcggtttcggtggctttgccgttcatcatctacggcctgcgacatcgctggtcgggttcgggaacgcttccgccgaccggtggcgatccgcttcctgcaggcaacgccgccgcagcgcagggcatcggcgggcccgatgcgaagccgagtgcttcggtgatggaatcggcggcgtttaaggatgcgcgcgccaaaaaccgtccgggcagttgagccctcaggtggtaagcaccgcgagccggtcggttcgccagaaacaacgctgaatgcattcaacgagaacatagagcaatgtatcaagagaaaggtaaaacaatgagtgagaaaagcaccgtgcttgagcagatggatgagaagaccaaatatctcaccccgatcttcggatccgaggcaagcgatacccagatgccgctcgataaaatgaatcaggaaccggtcgagccgcgtttggcctacgagatgatcaaagagtatctctccatcgaaggcaatgcgacgcagaacctgaccacgttctgccaaacctacatggagcccatggccaccaagatcatggcggagaccatggagaagaacgcaatcgacaaagacgagtatccgatgacggccgacctcgagaaccgctgcgttgccatgatcggcaacctctggaacgccgatccgagcgaggagcccatgggcacctcgactgtcgggtcttcggaggcgtgcatgctcgggggcctcggcatgctcttccgctggaagaaacttgcgaaggctgctggcgtgaacatctattccgagcgccgtccgaacctcgtcatctcttcgggctaccaggtgtgttgggagaagttctgccgctactgggatatcgagatgcgccttgtgccgctcgagaaagatcatctgtcgctcaacatggataccgttatggattacgtcgacgagtacaccatcggcatcacggctatcctcggcattacctataccggcaagttcgacgatgtcgagaagctcgacgagctcgttgaggcgtacaaccaggagcacaaggatcttccgattcgcatccatgtcgacggcgcttcgggcgccatggtcgcgccgttcgtcgatcccgatctcaagtgggatttccgcttgaagaacgtttggtcgatcaacacctccggtcacaaatacggcctcgtgtatcctggcatcggctgggttatctggcgcagcaaagaggcgcttcccgaggatctgatcttctgggtgagctatctcggcggtgaagaggctacgatggccatcaacttctcgcgttccgcttctcagatcgtgggccagtactacgttttgatgcgcaatggtttcgagggcttcaaagagatccagcagcgcacgctcgacgtggcgcgctatcttgccgccgaaatcaaggagatgggcctcttcgaaatctacgaagacgcttccaacatcccgatcgtctgctggggcctcaaagatgatgcggacgtgtcatggtcgctctacgatctgtccgaccgcctgcgcatgagcggttggcttgtgcctgcgtatccgatgccgaaggatatggaagataccacggtgcagcgcgtggttgcccgccaggatttctccatgcagcttgccatcaagctcgtcgaggatatgaaaaaggaaatcgacactctgaacaaggcgaggttcgtaaccggaaacacgcagggagtcatcaacaccggattcaaccacggtggacgtgcggcggttgacaaggctgccgatgtgcagtcctcccagactgcgaagtaatcgtttccgacacccggtgcgataacggcagggcgaagaggggcgcatccgcgtaagcgggtgcgcccttgccgttctgcttgggattgcgcgcgggcgctgcatgcggggcagggtgcgcgcgggcgcgcacggcgttgcagccggatgcccggatagctgcccggctcgtcgccggttgcctagctgaacagcatcaagctcgcatacgcgatgatgccgccgcatgcgccgaagccgatgacgagcagcgttttgcgcaccagatggttcttgcgctcgcgggcggctttttcgcgatcgacgggcttgccctccatgaacgcgaggatctcggaatacgttttcacgtcgttcttcttcttgatcctgtcgacgataactgcgctgaccatggcgacggcccagagggcgaacggcagcaccaggccgggaaatccccacatgctgaagcacgggccgatcagcgccacgcagagcaccacgcagacgagcatgatccatccgagcttgttcatcttgttggcttcgacggtttctctcatggttttgacatctcctttgactagttcgtctatcgttacgtcgaaaagagcgctcagcagaaggaggctttgcacatccggataggtacggtcggtctcccagttcgatatcgtctgacgcgagacgtatatcttctctgcgagatcctcctgcgataacccgcgggccgtacgatggatcctgatctggttgccgagttccactgcattcctttcgcgattcggagcatgtcatgtcgggagatacgataccaccaaaacggtttgacatgagggttttggcgctgtctaaagtgtttgacaggcgtgggatctggacgttcggcgcgtgtggctctttgcgtcgatgatgttccgtatccccccgtgaagaaaatcgttacgtgggtgcaggttatttcggttttgtacgctttctcgtgcctctaaaggccatgttctcgccatgcggatggcccgatattggtaatgtcggaaaggtcccagatcagagaaatggccgatttccaacatgaacggcctcggctcgcctcgacgccgcgaagcacgcaaaaccgaaataacccgcacccaggtcaggctttttctcacgaaagcttgggattctattcgatttggtggtgattcgcggcatcgcgtgaatactgcgtttcgcgaagaggttggctccttgcagcgttctttgcgatgatgggcggcgacttcttgcgcagaaggcgatggcgacagggcgaccgcggcggccgcattattcgcgcggggcggcatcggggtgcgcaggcaagccgaagccaaagccaaagcgaaggcggccggagcatgtccggccgccttcgcagagtgtaatcgatgtcgatgcttacggtagcgaaatcgctatttcaatatcataaaaatgacggtggcgagcgcccagaggaagaaaagcgcgccttcgatcttcgcgatgacgttcagcgccgtgttctgtgcctttttgcgcgtgaacaaaatctctgcgttgagcagagaaaacgacatgatcatgagcgtatagctggatacgttgctctggttgccctggtacagcgagcggaaatacccgacccagaagaaaagcaagaatactatcagcaccgactgcgaccatttcttgaacctcagatccctctcggctttgcttgcttcctgcgtgctgccttcggccaattggttttccgtcatggtgaaactccgttctcgaatacgtggcgaaccttatgccgagaaccttacccgtcttttcccgacagcgctgcccaatggcttttgcatcgggggttttcgggccgtcaaaagtatttgacatatgcttgaactgggaaaatactttagtttggttcaggtcctgcttgggagcgcttgcagtcgccccgcttcaccagaccgccccgtcttggcgaagcggggcgacttctcggcgggcgtcgataggggcgtgcggacggatgcgtcgatcatcccatgacgacaaaaaggcgcagccgaagctgcgcctttgcgaggatcgcgtgttgcggtttgtctatccgccgataagcgaggtgagcgaactcaagaagctcgacatgttgcgccagcacatgaacagcgtgatcacgatgatcacgacgcctgcgatattcgcgaacaggtggtttctccacttgccgagatccttaccgttcgcgcagtacagcacgaagaatgcgatgaagggcaacaggatcgcattcgccgcctgcgcaaccaagataagctccgtcgggctgtgaccgagcacgattgccatgatgcagccagccagaagcacgatcatccaaatgactttgaacttgatgtccttgagcgttttcttccagccaagtacgccgttgaccgcataggcggccgaaagcgacgccgtgatggccgaagagaaaccggctgccagaaggccaaggccgatcatccaggtagcccatgatccgaggagcggctgcaaggcgagcgccatgtccttgccgttggcgacggtaacgcctgtgccgtagatgtttgcggcggcgcagatgaggatggccatcgaaatgatgccgccaagcccgatggagattacggcatcgaggcgcgcatcggatactttctcggggtccttccagcgctctccggcgcccgatgcgtgcaggaacaggttgtacggcacgatggtggtgccgatgaggccgacggcggttaggattccggcagatccctcggcgggcagcgccggcatgaacaggccgtgcacgaccgcgccccagtcggggctcgaagcgaacgcggtaacggcgaacaccacgcccatgaatacgacgatggccgtgaggataacctcaaccaccttgtagctgccgatccacatggcggcgaacgccagaaggcccagcacgatgacgatggggatcatagggatatcgggagcgaatgcctggatgcccagaatgccgccggtgatgttgcccgtttcgtaggcgatgttgccgacgaagatggcgatgagaacaaccacaatagcaatccacatcagtgctttgttgggaatgcgatcgcggatgttttcacccagacccttttggctgacaatgccgacgcgcgcagccatctcctgaaagatgatggttgcaaccgttgcgaagagcaacgcccatagcatcgtatacccgtagtttgcgccggatacggtacatgtagtaacggtgccggggccgatgaagccggcagccacgagtgcgcccgggccgatgctcttcagacgctgaactatcgatgagctcatacagcctcctccttcttcttttgtcgttgcggatactgcccctcatgcattgtctcagcggaaaccgcgcaaagccccgagacggtcgtgaattaaccgacgcgaaacgcagaggcaaaacaatcaggttgattgtacctgaaaatgcaagatattatgctcacgcaatggacgaagggcgacgcggtcccagtgagccgcgaattttaccttgcggctctgcctgtgcctcgtcggtttgcattgcaaagagccgttcgctcgatttcgaaacgcagtgctgttcttctccccgatcatgccataatggatgcgaccaataggcgggctcgcaagcccagtggatttcgaaggctgcaacaacatgctcgaacaggcgcaaaaggcactcaaggaatatttcggacaccaatcgttcaggccgaatcagagcgagcttatcgagcacgtgctcaagggcgatgacgtgcttgccgtgatgcctacgggtgcgggcaaatcgcttgtgtatcagattccggccatcatctccgacggtcttgccatcgtcgtgtcgccgctgatatccctcatgaaagatcaggtgagcgcgcttaaccaagcgggtgtgaaggcagcgtttctcaacagttcgatttcccctgtcgagcaggcggaagtcctcgagtacgccgcttcgggctcgtgcaagctgctctacgttgcgcccgagcgccttgacgccccgcggtttctttcgctgtgcaaaacggcaagactgtcgcttgtggcgatcgacgaggcgcattgcgtgtctcaatgggggcaggatttcaggcccagctatttgaggatagcctccttcatcgaaggtcttcccaaacgtccgcccgtatgcgcgcttacggcaacggcgacgcccgaggtgcaaaaagacattgcgcgggcgctcgagttgcgcgatccgttcacgctcgtttccggattcgacagggcgaatctgtacttcggggtagaacggcccgatcccaaggcaaagcgcgcctgtctgctgcgtcttgttcgcgaacacgcagggcaggcgggcatcgtatactgctcgacgcgctctgcagtcgaagatgtttgcggtcttctgtgtgaaaacgggtttgcggcgacgcgctaccacgcggggcttgccgcctcggagcgacatgcaaaccaagaggatttcctgttcgaccgcaagccgatcatggtggctaccaatgcgttcggcatgggcatcgataagtcgaacgtgagtttcgtcatccactacaacatgccatccgatgtggaaagctactatcaggaggcgggccgtgcggggcgtgacggaagccctgcggattgcattctcatctacaacaagaaagacgtgcagacctgccagttcctcatcgacaaaagctacgaggaccggggcggaggtttcgccgacacaggcgcatggagcgattctgcaggcgagtccgccctcgcggatgccgatggcgcctctcgcgcgatctacgatcgagattgcgatcgtttgcgccaaatggtcttctactgcacctcgaccgattgcctccgctcgttcatcttgcgctatttcgggcaaaccgattccccttatcgctgcgagaattgctcgaactgctcgaccgatttcgaggttgaggatgtgacggtcgaggcccagaaaatactctcatgcgtgctgcgtcttgcgcaacgcgatcggcgggcgggcaaggcgctcatcgtcgatattctccgcgggtcgaaagcggaaaagatacgcgcgcaaggctacgacgggcttacaacgtacggcatcatgggtgccgttcccgccaagcgcatccgttacgtactcgacgcgctgattgccgaggactaccttgtccagacggcaggcggctatcctgtcgtcgagatcacggggaagggagccgccttcttgaaagagcgcggttcgttcgagatcaaggttcccaagcggttgccgaaagaggaggttttcgtcgagccgggtcggcgcggcgaagcgcgcggacggtcgtcctctgcggatgccgagctgttcgagaagctcaaggcgctccgtttcgagctcgcgtccgaagcgggggtgccggcctacatcgtgttcaccaatgcagcgctgctcgatatgtgcgagaagatgcccgcaaacgaagaggagctgcttgccgtgtcaggcgtcggacaggtgaaagccgagcgctacggccgggcgtttttggattgcatcagggaacatgttgaacgccgttcggccgcgccgccttctactcaacgggtttgatttcgattccctccaactcgagagcgctgcggatcttcgaaacgaattcgagcgcatgggcgttatcgccatgcacgcagatcgtgtcggcttggatcgcgatggtctttccgcttgcgctttcgatggtgccctccttgacggcgcgaacggcgcgccgcacggcgaactcctcgtcggcgatgagcgcatcggcgcggcttcggggcacaagcgttccctcgtcggtgtagtttcggtcggtgaagaactcctgggcgacggcgagaccgcgcgcgcggcccgcttcgatgagcttgccgttcgcaaggccgaccagcacgagttcggaatcgacatcgcagaccgcttgcgcgatggcggaggcgaggtcggcatcaaccgcagcacggttgtagagctgcccatgcggtttcacgtgattgagctcgacgccttgcgcagcgcagaacccggcgagcgcgccgatctggtaaaccgtgaaggcatacgcttcttcgggagagaggttgaggtcgcgacggccgaagccctgcagatcgggatagcccgggtgcgccccaatggcgatgcgcgcggctgcggccatggcaacggtcttcttcatgacgagcgggtctcccgcgtgcatgccgcacgcgacgttgcagctcgaaacgagcggaatgacctctgcgtcgaggccgagggcgtagcgaccgaagctttcgccgagatcgcagttgagatcgacggtaaacacgagggctccttttcccttcttgaacaacctgtctcgctattgtagcgcaaaatgtctcttgctcttgggcttccgaactgggaaatccccttttaggggaggtctttctgacaagaaacctccttctgagggctattgcgctcgggggaggacgcatagggttttcccagcaagtcaagcgatttgcgcgatccgaaaggggagaagatgaaacaggtaacaagaagaaactttttggggctgagcgccgcagcggtatctggcatggcgtttgcaagcgtagcaggctgctcgccatctgccgagggagattcgggtatccagaattctgctgtgggtgccggcactgcctccgatgcgtctactgcgtatgcggttcgcgcttctggagcggataggtttgcgatcaagcccgtgaaggcatcggagcttggggagccgtacgcgacttgcgaatggctggtgatcggtggaggaaataccggtctgtttgcggccattcacgggttagagctcgggatggacaccatattgcttgagaagaatccgatgacgggcggtgcgggtgtaggaacggaggcaacccagcttttcaacgatagcaagtatttacaggaatcgggttctccctgcggcacctctgccgaggtctaccattatttccagatgcaaaacgcatggctctccgacggccttttggtatccaactacatcaagcataatcacgggccgcacgattggctctacgataacggtatgggcattgtcttttgcgcttcgggtggcgttgaggcgccggtaggcggaattatgtatgaaggcatgggatctggcgtcaatgcattcgtgaccgaaaaattcgaggaaaaaggcggtcgtctgtatacttcgatgggagctaccaagctcgtcgtcgatgatagcggcgcggtcgtgggcgcactggcggacggaaaagacgagaaggatttatacttttcagcgaaaaacgttttcttgggaacgggcggattcggagccaaccccgatatggttgcttactatatcggcgaagcggggacgatcgcatacaagcgcgatgagcagatgggcatccctcacaatggagacggtatcgctatggctttgggcgttggcggtgtcgagtcgcaagagatgtgggctgccgcacctgggcaggggtcgccggcaagccccgacaacgtttgggattctgagatagaccgtgcatgtcgcgaggccaatctttgggtgaacgagcgaggaaagcgtttaggcaacgagaagtgggatgcgatttcgtcgaatttcggtacggcctatcgtcaaaatggaggcttttacttcaatgtcttcgaccaggctgccgttgagcgcatggagacggagcccttcatcatggggtctcgctgggttatcgctccggaaggagatggggatcccatgccgagcatgggagaagcgctggatgctgccgtcgggggaggtgcggtatggaaaggcgataccgttgaggagcttgcctcatctgctgggatcgatgcagagggccttgccgccacgattgcccgctacaatgagttggcgcgcaacggcgaagatgtcgatttctggaaagaccccgtagcgcttcacgaactggctaccggtcctttctatgcaataaaggtggttcccacctggttttctactctgtgcggggtaaaagttgatgaggatttgcgcgtaatagacgcccagggttatcccatcaaaggactctttgcaggtggagccgatgcctcgcagtttttcatgaccgaatacagtcacggctttgggggatcatgttcggcattctcgtacttctgcggatggtatgcggccgaagtagctgaatcttctttatagtgctcgagttgttttgagcagcctgttttctgctgcgtgaaaatctcaatattgacgaagggagccgtcggatctatacagtccggctgctctcttcgtcaattagcgggactatagctgcgggcttgtttcctctctgcgaagctcgtcgtacacgaggtctaagagctcttgcttggaatgcacgttgaccgtggcgtagattgctttccggtaggtttttactgtattcgaggaaaggaacagcgcctctgatatatgaggaatgctgtgtccaccgacaagcagcgtcagcacttcgagctggcgctttggaagcgaatatcgttcagcgatattttcacaagcttgtgcgaggtcggataccgtgagcgcctctttggcgttccagaccttattcgactgctttcgaaggaaaggcaggaagaatgtggggatcgtcaaaagatacagcagaagggctgttatggcaaaaggtgcgagggcatcgagggggtgggccgttgttgtgactaaaagaatttcagggattctggccaaatacacgaacccgccgaacagtccgtaaacgacgatcgccgacgtgttcaattgcttcgaaatcgaacagcatgtgagcatcatcaagaacgaaaccgtgcagaagcaaacgtctccgagaaacaggacgaaccatcgctgactcggttcgaaaaatgaagctatgagcacagagcttgccagtacggggagcagcatgcagtaagcattgaacatgcttacttttctgttcatgccgagatagatcacagcgagcaccgcaagggcaacggcgtttgcaatttgggccagcagcgttctgaaaaggtcttgccctgtcgtgtctatgtatgtgatgctggcgatcggggcaacaagcgtcagcacgattgcgcagatgattgggacggcgaggctggagaaaagtcgcctggagcctccttcgatgttcgctggcgcagccttgtttcctgcgactcgaagacttttggtattgagatgcagcagcacgatcgttgcgggaaccaatgcgatggcgaagatgagaatacgccattcaaatgggacgaaacagaaaacaatacccgaaactatggaaaaccctgatgcgatgaagaggagcaattcgatttccctcgttggtcgctctgcaacaatgcggatccattgcatgaatcccgccgcaatgcccacgcccatgctcatgccgtatgcgacgaggagtgcgctgacctctaggccaaagtaaagagcggcaatgcatacgattgcgatgacgaagctcccgagcgtaattcgctcgaaagcatgctggccgataggccgacgcttccattcgatgagcgcggcaacgaagaacagggcgacgtaggctccctgttgcggaatgacgtatgcttcgacgttcgcttcgggcggcaagagcggcagcatataggttgatcccgagcatgagacaagtatcatccagacagatattcccacagcgtacaacgtgaaatccgacaagtggaatttggtcagcaaggattttgttccgttcggtttctcgggcttccgtgggccatcgctgcccctcgatccgttcatcgttactttatcgaacaagcgcttcgcgcgcgagctattctttcaaatcgatgttcttcgtatcggtgatgagcatgcagccgggtgcatgggtgatcgcgaattcgggcttggaattcatgacgatcgattgcggggttacgccgcatgcccagaacacgggaacttcgccttcgcggatatcgacgggatcgccgaactcgggatgggctatgtcgcgcacgccgatcgcggcggggtctccgatatgcatcggcgcgccgtgcactttcgggatggcgccggaaatctggacggccttaaccacttgatcgtgggggatggggcgcatcgacatgaccattttgccgcccatggaaccggcaggcatgcagtcgatgtcggtgaggtacatcgagacgttgcggcccatggtgttgtggcgcatttcgatgcccgcctccactagttccgactcgaaggaaaaagagcagccgatcacgaaggagacgaaatcgtcgcgccagtaggcggcgacatcggcggtttcttcgacaagctctccgtggcggtaaatgcggtacttcggaaagtcggttgcgatatcgcagtcggtcgcgcagatcgttgcctcgcgagctcccacctcggtcacctcgagcagggggcagggcttggggtttcgctgtgcgaacagcagaaaatcgtaggcctgctcctttggcaggacgatgaggttcgcctgcgcatatccagggcaaaggccgctggtgggggcctggaaggctcccgagcgaatgatgcggcgcgcctcggcgggcgtcgcgcgaagcatgcgatcccagacctcggcatcaacgccttcgggtttgttcgaaacggtgctcatcgttgttcctttcatcggctcggctgaattcgaggctttccgcattgcttctgcgccatcggccaacggaaccgtcgggcatgccgaccgttcgggcgcgtcggtatcgctatacctcgcccttcaagaactgctcgatgaagccagtatcggcggttcccgcggcgaacgtttcgttttccatgatggcgtactggaaatcgagattggtcttcacgcccacgactaccatttcctcaagtgcggtgcgcattttggcgatggcttcggtgcggtcgcgtccgtgcacgatgatcttcgcgatcatcgagtcgtagtagggggtgatctggtagccgtcgtaggcggcggtgtccacgcgcacgccgtttcctccgggcaggtgcatctgcgagatggtgcccggcgagggaaggaagccgcgggcgggttcctcggcgttgacccggcattcgatagcgtgtccgcgcgggtcgatgtcttcctgggtgaaggtgagcggctctcctgccgcaacggaaatcatttcctcgatgaggtcggtgcgcgtgaccatttcggtgacgggatgctccacttgaatgcgcgtgttcatctccatgaagtagaacgtgcgatcctcgtcgagcaggaactcgacggttcccgccgatgtgtagccgaccgcctgtgcggcgcggatggcggcttcgttcatggcggctcgaatctcatcgttaacgaacggagacgggctttcctccaccattttctgatgattgcgctgcaccgagcaatcgcgttcgccaagcgaaacgatattgccgaaggtatcgccgacgatctgcacctccacgtggcgtggattcaggatgcaccgctcgaggtacatgctgttgtcgccgaacgcgttcatgctttcgcgctgggcgatgctgaacgtttcgatgaaatcgtcctcgcacgaactgacgcgcatgccctttccgccgcctccggcgctcgcctttatcatgatgggccaacctatttcacgggcttttgcaaggccgtcttcagcggagtggatcgggttgcgcgtgcccggaacgacgggcacgcctgcatccatcatggtcttgcgcgcttggcttttgttgcccatgcggtcgatgacctcgggggaggggccgatgaatacgatgccgttgtcgcggcaaagcttggcgaacgtcgagttctcggataagaatccgtatcccgggtggatggcctcggcatgcgtcccctttgccgcggatatgatcgaggcgatgttgaggtagctgtcgcgcgcgagcggaggtccgatgcagacgctctcgtcggcgaggtaggtgtgcagcgcgtggttgtccgccgtcgaatacaccgcgaccgttttgatgcccatggctcggcaggcgcggatgatgcggacggctatttcgccgcggttcgctatgaggattttctcgaacataggctctcgctatcctgctcggctactgggccaagttgctggtggctatgcggaacaggggctggtcgtactccacctgggttccgtttccggcgagaacctcggttatgatgcccggtaccggtgcggtgatctcgttcatcatcttcatggcctccacgacagcgagcgtctgtcccgaaagaacctcttggcccgtcgtgacgaacgggtcctcgtcggggctcggcgatatgtagaacatgccgacggtggggctgcgtacgagaatcgacgaatcgtcttccgtctggtcggcggctgcggcgtcgttgctctggtcttttcccgctaaaagcgcgctcacccgttcagccatgagcggaagcgttgtgggggagaacgagctgtggctgcgctcgagttcgattttcgtgtcgccgtcatcgatgcgcagggcggtgagctctgccttgtccatgatcgcgatcagttcttcgatggtcttggtatccacgctggtctccttaaacttgctttggtcctgctgctaagaacggtctatccagagcttctcagcctgattgcggcgagcctgctcctcgaggatcggcttgagccgccgtgcggtgcgtcgaggcgagatgccgtcggcgcatggtcttcttactattttggcaaggcctttgaagtacttgtactcctcgcggtatagcgcttgggcctcttgcacggtgatgggggcgaaccgaatcttgcttcccgggcggcactgcacgagcttgggtatatcgaccgaggcgatggttccgattttcgcatagccgccggtggtttggcggtcggcgagcatgatgatgggccggccgtgcgaaggaacctggatggctccgaatgcgatgccgtcggatatgatatccgagccgtgtttcgtctcgatttcgggtccgtcgaggcggtagcccatacggtcgcattttgcggtggcctcatagggttggctgtagaatgtttcgatgccccgttcggtgaacatatcctcttgggggcctggcacgacgcgcacgatggtttcctcgttgccgaacccgtacgtcgcgtcgtactcgatgcggtgcgacccgaggtttggcaaaaaatcgagattcttagtcatgaacggcagatagtcgcccatctggaggcttcgaccgtgccagccgccgataccgagcttgaggctggtcgagcgacttcccatcacttcgggtatgcgcaccgatcctcccgcgatggccacgtatccgtaggcgccggttctcggcgtcgcgaaatgaagaatcgacccgcgtttgaccatgagagccgaatacatcggcacgggctcgccgtcgatcgtcggcgagaaatcgccgccggtgatggcgatgaacgtgctcgtggtgaatcgcagcgtggggccggcgagtgcgaactcgatggcgcaggtgttgggatcgttctcgacgagcaggttcgcgatgatgaaggcacgccgatccatgacgccgctcggcgcaaagccgctccccatgtatccgatgcgacccgagtcctggatggttgtcagcacgccgggctttttgacgacgaggcccatgctacattccctcccagatgatctggtattcgtatgcgttcgccgagagctgcgtttctatggcgctgtattcatcggcggagatcggcacgaacctcagatattcgcccgccgcgtacaggatcggctcttcccgatcggggtcgtaggggcgaagcggagtgcggccgatgatctgccagccgcccggcgagggcagcgggtagatgcccgtctgagtgccgccgatgccgaccgagcccgcctcgatgagcgtgcgcggcgtggcgaggcgcggtgtgcagatgcgctcgtcgagcccgccgagataagcgaatcccggcaggaacccgagcatgtcgatgaggtaatctttcgaagaatggatgtcgatgacctcttggacgctcagatgagcatggttggctaccgtttggatgtcgggaccgtattctccgccgtagcataccggtatctgcactatctttttcacgaatacatcggccgagtcgagtccgcgcagctttccgcgcagtcggtacgacagctcatcgaacgtgacttcgagcgggttgtaatacaccatgagcgagcagaacgtcggtaccagttcgacgattccctcgatagggtcttcggtgagattctgggcggcaatgcggatcatggtgctggtttcgggcgtgatggtgtcggcgaactcaaggttgagcgccgaatctcctgctatggttatgctgaagccagccatgtatgtgctcccagtgtgtctccttgcatgaaaacggttgtttgcccagaaaaaccgcatacccgaagtactgtaccaccgtctcgttgccaaaacgccagccgtactagaatggtaaccttcatgcgtcgaacggccgagacatgtcgatgcggcgcccgactccgaatgattccgtgagggaattttaacatataggttttctacaggggctgttccttggctcgagcggcttcgacgatgtctatcagctcctgtttcgaatggatatccagtttcgaatagattcgcttaacgtgtcctttgaccgtgttgcgcgacagatagaggttttcgcacatgtagttgatgtcgcgccccttggagtagaggcccagtatttcggtttcccgtcgggtaaggccgtattgctgagcgatcgagaagaacgcctcggatttgtcggcgggcgattccttcgcttcgccgcccgtgttttccgctgcaatgtcggcatcgggtatgtcggtggacgcagattgatccaccttccgatctctccaggtcagaataagagcaacggcgaacaccaggtttatcaggaacatgaggagagaggtcgattcgaagtagctgctataggaaggaacgccgaacattccgggaacgtacaaaccgacgaggaagagcattcgcatgcatgcgtagccgagcgacacgagcaccatggccccccgtcgttggcttgacagctcgtcgaggagcagcgagcagagcaggagaaggctcagttgaaatccagcgctcagcaccaagacgatggcgtcgaacgcgggaatccagaatacggtgagcagaatcaggaatatggacttgatggtcaggccgtagttcctgcttttgctcgcgtaggtccatacgaggaacaccgctgagccgatgggcgccccaaggtaggagacgacctctccgtaaggggaaccgtcgtggcccatggcgatcgcttcggctatcccgtatatgaacacgatgaggcagaatccgacggcggggccgaagagaacgcgggagagcactttccgatgacgcagcacctcgatacccgagcgaaacgaggcgagcgccacgttcgcattcgattgcggaggcgctgtgcggagagccaggtaaagcactgccgaaacaaggcacagggccaaggcggcttcgttggtgaatgccttgttcagaagggcaacgattgcgaaaacggatgatccgaggaaggcttgccacccgaagaccagcgcgcccttcctctcttgaaagccgcttatcgtttcgaaccacgatacgagtgaaagggagagtccggctccgcatccgatgcctgcgcatatcgtaagcggctcggcgtgcgttcccagctgcatccccgttgcggccagtcccgcagataaagccgcgtagccaaacagggcgattcccgaagtcgtcctctcgctgcatcgtgcggcggcgaccgcgtaggcgaaggcggcgattgccgacgataggtacagtgcttgattgaagagacggtaggtcgattggtcggcgtcgggcatgagggtgagggggaagaagcatgcaacgaatatgacgtacaggcatccgaatccgatgacggagcaagcagatgcgtatgttcgagatcgaacgatgtccatggtccctcttgtgcgtctgatcgtgcaaagatttctcatcatagcacaaagacaacggcaatgaaatggcaaaaccgcaataccacccttcgtgggtctatccgaaaaccggcatgttttgaacaatgggcccaagcggcgccggcgaatcgacgccgccaagggatgcgtgcggaaacggatcgcatgcaggaagaaaggatgagctatgaaaaacggaaggatatcccgtcgtgcgtttctcgcaggatccgcaacgatgggagctgcaacggttttgggcttgagcggctgcgctgcacaaggcgcctctgccgagaaagccgaatcgggaaacgagagcgtgcaggattgggcccggtctctcaacgtcgacattgcttcgacgctgccgggcaacacgtctgaagacattgcggtcgaagagacgaaggagtgcgacatcctcgtaatcggaggcggatgctcgggtgccaataccgcgatcagggcgggcgagctcggcaagcgcgtcattctggtcgagaagacgcagacgatcggcggcgccagcaacaaatcgtcggggccggttgcctacaacagcaagtacgccaaggaggccggcgtcgaaaccgacatccttcccatcgttaacgagtgggtgaaggattctcattggcgcgtcgacgcggcttcgatccagcagctcttgggcacggtaggcgaagccatcgactggatgagcggcaacggctgggagttccagccgtggatggggccgactatggtaaagcttcccgactacgatgctcgcgagggcctgttccttgcggcgcttgagaagttcgtagcgccaagcggagaggttttgaccgagacgaccggcaagcagctcgttgttgacgagaacggagtcgtcaccggcgccatcgtcgtagacaaagatggcaagggcatccagatcaatgctggatctgtcgtaatcgctacgggcggatatgcgggcaatcgggagatggtgaagacggtctttcgtttcgatggcgtgctcggggggctccctcagaatatcggcgaggggctcgaaatggcttggaaggcaggtgcccagaaaccgcagaacttcggcggccagatgctgcatcaaacgctcgcccgcgcaacggatgagatcaaagacgatttcgatgacttccctgcgaagtaccccatgatcctctgctatgttgcgcaggtgcttaacgttggggcgacgggcgcacggttccgcaacgaggaactggttttaagcgcttgcgactcggcaaactcgagcgcataccaagggtctttccattacgtggtcgtttcgaagtcgatcatggacactctcgagagccaaggtcttgcggggctcggcgtggaaaagagccctggtcttcctccggcgtacaagcccaagttcgagctcgacaccccctgggagggcatcgccgaggtgttggacaagatggtcgagaagggagccggctacaagggcgacactccgcaagagctggccgaggccgctggcatggatcccgatatcttcctggatcagatggcccgctacgatgagtactgcgaaaccggcatcgattcgcaatttggaaaatcggctgcgaatctcatcgcttacggggagggcccgtactacatcatcatttcggaagagaacagccttggttcgtggggaggtttgctgaccaacaccgactatcaggtgctggactacgatcgcttgcccgtgaagggtctgtacgccgtcggaaacgaagcgggttcttgcctgtacaacgacacgtacgtcggatcgggcgttgccatggccaacacgatcacctctggctatatctgcggtacgaaactcggagaaaattaaacatccattgcggatgggccgctgcgatccttgccggttcgcagcggccgaaattcgcatgcgcacgttttggcagagccttcacgagagggattcaacgagatcgatgagctcttggtgggtgtgcacatcgagcttcgtgtaaatatgcttgacgtgagctttgatggtgttgtaagaaacgcagagttcagactggatgaagacgcctgttcgcccgcgcgccagcagtttgaggacctcttcttcccgcttggtgagcgagtattcgcgtaccagcgtttcgcaccgttcgtagatcgtgctttcagtaacgctgtcggcttcaagcgttgttttcggggcaacgctttcatgcacttcggaaatcgccttgtcgaagctgaaatctctgagaaccgcaatgacgtaggcgacgagcgcgaatgttattgcggcgacgacgatgatgacgacctgggaatcgtcgtgccaatactggttcgtgaaccgtcccgcgttggcgccgatgatcacgccgatggcattgagcgcgaaaccccaggcgaataccgagaccgctccgtgggtgttgcggcgggcgagggagcagagcacgatccagttgaagacctcgaataccgctattccggaactgatgaggccgttgggtaccgagaagcgaacgagctgcgaggcgggaaccaggagaaaccctgcgatggaaagcagcagagcgatgcggaagaggcgatcggcggtaatccatcccgccttccccacgataaacgcgaaggctatggcgaatacgacaagactccacagcgagttcgcgggtatgccgcctatttcgccgaacgtgagcatgaagccgtatacgattctgaagagaagaaagcacatgaatatctggtgattgaacggcacgtacgaagatggttgcgtaatggcctcgtcatgcggggatggtttctctccgagcttgacgagtacgtgctgggccgcgggatacgaaagacctatgatggcgatgaggcatgctgcgtgcatcacgagcatgatcgtggaataacccgttggaaaaacaaggctcgctgccgtggctccgagttccgctaaaacaatgcacgcgagggctcttttgtcactcagtttgcagagcaacagcccgacgaagatcgtgcagatgccccttgcgatagacgtggcgcatgctccggcggtcaaaacgggcagcgatccgaatacgtttccggcatagatcgttatcggcccaagcgccgatcctgctatggcggcaaagaggaaaaagcgggccttcagtatgcggggtcgccataccgaggtgatggcgatgaaaacgagcgcaatgccgtttgccgaggtgcataattcccgaatcgacgagagatggacatcgtagagggggaagaggtggttgttgagcgaccagttgctgaacacgagcagaccgagggcgcagaggcattgagcgaaagtccgcgtatcttcggccgggcctcttttaagggcgtgtgctatgttcgacggtgatttccccataataacagtgtacttgattacttggttgcgcaaaaggatggtggcctcacatgatataggcattgaactgggattttctaaaaattacccactgagggtgatgaaggcgatccgtttcatccgtagtatccgctgcgttcggcacctgcatcgagcctggtttcgggcacgcgatggctggttgtcgttttggatggagccatagcagaggaagggatgggatatggaatcattgggcaaaacgccgttttcgaggcgagggtttttggcaggcgttgcgcttgccggcgttgggggagcattggggttgtccgggtgctccccgcaggagcagaagggccaaggcgagacggcttcggatgaatcggcagagagctcggcgagcgattggcttgggtctgagcctgaaattcaggaagccgacatcgtcgagacgcttgatacggagatccttgtcatcggagcgggtacgggcggcctgtttgccgcctgcgcagccggcgagcttggcgccgataccgttgttttggaaaagttcgaaggcggggttgtgcgcgacgatgtcgggggagtcaattctcgcttgcagcaggagaacgggtacagcatcgataagcaggcgttcatgcgggacatgtatcgatatgcggcgggccagtgcgatctctcgctgttcgacatctggttcgagaactcgggaagcgttgtcgattggtatgaagaggttctcggtcaatacggtgtgacgttatggcacgagatggccgaagagaagaacacccccaactatcctcattgggcaacggggcattcgcctgcatggccccaggatggatcgcttagcggcttttccgtgctgagcgagtatgctgagaagaccgggcgcgttacgtttcgatataacacccccatggtcaaactgatcgttgaggacggcaaggttgtcggtgcttacggtaaaggggaacaggggtatgtgcgcgtaaacgcatcgaagggaacgctggtttgcacgggcggatacgggtcgaacgttgcgatgcagaaaatactgcagcctcataccacaacgatatacggaaggaacacctcgcaacccggatgcgatggcgatggaatcagggcctgcctttgggctggggcgaagatggacgaaacgcacacgagcatgctgtttgatcgaacagtggttcccgttggcaccgagggcgggtgcgattgtacggaaggaacgctgttctggatgggaagccaaccatggctcaaggtcaacctgaatggcgagaggttctgcaacgagtcgggaacatatgatttcatcttgcatgcagatgcgtaccagccttctcatatgcacgtgactttatgggattccgattacgaaagctatgcggagcagttcgatatgcatggctgctctcgtctgttcccctttgacaacggagcggcacctaatatcccgctccaagtcgttcaagggatgaatgctgatttgcttgagaagggctatatccaacaggcggatacgatcgaagagcttgccgagaagctcaagcttcccatagacgcgctggtggcgactgtcgagcgaaacaacgagaactacgacaaccaatctgatcccgatttcgggaaagaggcgttcaggctctctccgctccgaaagcctccgtttttcggggtttacaacacaggcacgttgctctgcactcttgatggcatcgtcatcaacaccgaggggcaggcgctgcgcgatgatgggagcattatcgaagggctctatgtggcgggcaacgattcgggcggtttctattccatgacgtatcctaacctgacgacgggaaatgcctgcggtcgaacggtaacgtttgcgcgtatgatcgcccaaaaactcgcctcatcgtagagccccgggtgctcttcgcttttctttccatggctggatgccggagcgatcttggcatccggccgtttctgttcggacttcgatcccgacagcgcgtcagggctttcgtctcgaacgattcctctgttcgtccaccgagaaagggagaaaccgatcgagtccgatggtacactggatgaattcgatttcagtggaacatggagacaatggaaaaagccctctttatagctgcattcttctttgcgtatacggtgcaggcgatcaccgggtttgccggcaatgttttcgccatgcccgtgggtacgcagctgctggggctttcgagctcggtcgccatcctcaatgcgatgggctttttcgcctgcggtcttctgacgatcatgaacttcaaaagcgtcaactggcgagaactggcaaaaatcgtcttaacgatgcttccgttcgtgctcatcggcatttggctcgatacggtgctgcccctccatatcctgttgcgtatttacggcgtgatcatcgttgcaatcggtttgaagaatttgctgcagaaaaggcagaagttccttcccgaatgggccttgtggaccattctcgctttggcggggctcgtccaggggatgttcgtgtcggggggcgcgctgcttgtgatctataccgtgcagaagctccaggataaacagcagttccgcatgacgctttctgcgacttgggcgatcctcaacctcatttatgcagtgatagcgttcggccaggggagtttcaccggtgaagtcgttcagattgtgctcatgtgcgttcccgttgccgtgctggccacgtggatcggaaaccgcttgcagaaaaagatcagccaggagaagttcctgaagctcacatacgtgctgctgctgttcgtgggcgtcatgctgcttgtgagcgcgtagactggccagcattttcgatcatcgatgaagttacggcagtgggcggaggcgtgccgcatggtgcttgcgtgccactcggatgggcaccgatcgaaaacaggtaacttcttaatgtgcacacttttccacgatgtgttgcgtttgccgcctgcttgcgctcgcttgcggccctcagtcgttgtcgcaaagaaaatcgacctgggcaaacgcggtgcattctggacgatggggcgttgcgccgtctttcgagcgcaacacatcgtggaaaagtgtgcattggccgtccgctcgtcgatcgaggcttcgggccgctgccatcgataagctctggctgtctccgcggatctttccctgaactaggttggcgttgcccgagcaaggcggggcaattcggctagccttccctcggcgtttcgaactgcgggtcgatatcgcgcatgaggtcgaagagctcctcgcggtcgtgcacgtcgagcttccggtagatgtggcgtatgtgcgcctttgcggtgccccgcgcgatgaacatgccgtcggcgacaccgcttgccgtctttccttcgagcagcagcgaaagggcttcccgctcgcgcgctcccagaccttgttccgctgcgaacgaagtgatgaacgaagaggatacgacgtcttgttcgcccggtttgccctgttgcttgaagcggtattttgaatacagctgaatggttctgttgttgagtccgatgaacgtacaggcgatgatgccgacgattagacatatcgatagcaatgttctgagcgtgccgctctggtcgagcgcgctcatcgccaatgcgacagggcggccgagcaagcatccgccgaatatcgtgagaagcagcagcgcggcaagcttatgcgggtcgagcgcgaagcgggttccgaggctgcagaacaaaatgatgagatacgagatgttcacagcgcatcccatggttgccaaagaaaagatgaacgactcgtcgatatggagaaacgaggcgaagagcatgcctgcaaccacgagcgtcagcgcgatgtagagcagcgaggcgatgttcacgcgcttggagaacaatgcgacgatgccgagcacgagcgctgcgggccacagcatgctccatcctgtatccgtgtgccacgactccaatcccacgaacgataccgaaagcatgaaggcgaagctgaagagaaacgcggtgagcagcggtccggcaagaaacgcgaacgagggtttttcggcagattcctttcttacagcagatttcggtcgtttgtcgagggcgcgtgatagcgtccagcccgagagcagtaccacggcggcgtatccgacgaagagccgatcccatagcatgccgaggagaaaccacgatataaggcagccgatcacgatcgaaacgagaagagagaacgcgacggtctcgacggcctgccccacgaaaagcccgaaccagaagatagctactgttccgatcaaaaatccgaccgagatggcggaggcgatgagggctatgctgtagaggcccgaagagatgggcgttgcggtcatcaggaacacgaagccgagggcggcgaacagcgaagatgctatcagaatcggcttgcgggctttgtcgagggcgtgaggatttccgatcaccaaggctatcgccgctacgacgatgctcgtgatgcagatgacgtcggcataggaaaggccgagggcggtcgtcttgtagccgttcgcgtagtgcgtgagcgttacgatcgccacaagaagcgatgagccgaaatagtaccatttcgtttccgccgcgcatgatttcaaggcgtcttttgcggtcgaccacgcccgatcgattttgttcatagcgatcccccaatgctctgcattgtccctgcttgtattgtcccacaggctttcgattcgcgacaggagcgattgattaacctagggggttagcgggtggggttagtcgcttcggcgagatcggcgttgcttgggtctgggttaaccaagcggggtattcccacaatgatcgctgtggggcacgaggggtgcctcccgatcacggagggagaatcacatgttgaaggaaagcgagagcaaggtgtcattatcgaggcgcagttttcttacgggcgcggcagtgcttggtgccggtgcggcgatggcgggtcttgcaggctgctcgtcgggaggagatgccgccaaacctgcggccgacgatgtggctgcggaacccgctgcaaaatctgcggcgaccgaggacgctgctgtattgggccagcagccgtgggagattgctcccgagccgataaccgacgatcagattgtcgagacgatcgactgcgatatcgccgtttgcggcgcgggcattgctggtctgccgggtgtggctcttgctgccgagaacggtgccaacgtgcatgtgctcgaaaaggctggcacatacagcacggcgcgcttgtgcacgtgcggcttcaacgccaagtgccaaaccgataacggtattacctacgatcgcgacaagttcattaccgatgtatggaagatcaccaacggcagccagggtcgtatgtcctcgtacggcaagtggttcgacaacagcgctccgtacatcgattggctgcaaggcgtatgccagtcagtcggatgcgacattatccctcagcaggtgacgggattcaaggttaccaacgacggtgttggccaggtgggtgcgaacgagttctgggcaacatatgctgccatgatctacttcgtcgacaaggacggaaagacgcttgccgacggcgtgaacgtcgattggactggcattcttgccgattacgccaccgacaagggcgcgacgattcactacaacacgcctgccgtgcagctcgttcgcgatgagtccggacgtgtgacctcggttatcggcgaaaacgaagtaggcgaatacatcaagatcaacgcctcgaagggtattctgctcgcatgcggagatatgggcggtaaccgcgagatgatgggctattacaacacttcgcttctgaaaacgcgcagcgtagctgaaaccaagaacaccggcgacggtcagatgatgggcatgtggatcggtgccgacatggacgatttcgccgctggtgaccttttcccgttcgtggcggtcgatcaaaccggtgagcgtccgacctcacccgatgcgaaatcctatgcggccgttgcgaacctgccggtattcatggtggacaatacgggtcgccggctcatgcccgaggacctgccattccaggcgtgttcggttcccaagatcaccgcgaccgcagacggctcggcgtggagcgtgtgggacagcgcatggcaggagaagttccccgagggctttcctgcgggcgactacctttccgagaattcgcccgagcagatcgagatcgacatcaagaacggtgtgaccatccaagcggacaccatcgacgagctcgccgacaagatggatgtcgatcccgacatcttcaaagagcagcttgaccgctaccacggattctgcgaagccggcaaagacctcgacttctacaagaacccgctatggctcaccaccatcgacacgccgccgttctatgcatcgcgccacgttgtgagcatcacaagcacgcgcggcggtctgcgcaacgacgagcgctgccgtgtgctcgacaaggagggcatgccgatccccggcttgtacgtggcgggcaatacggcgggctccttctacggcaacgtgtatccgcccaacgtgatgggctcgggcatcggccatggccagtgcttcgcatggcttgccgtgaaggacatgctcggcatggaatacatctagtcgcatcgagtggacggcgaggagctaaccatggataagaagaaacgcgtttcgctgacgataaaactcgggcttgccgctgcgctcgtcgtcgccctgattgccctctgcgcatgcggcggctcaagcggcgaaagcggcgagggggcttcgcctgatgctgcggcaaacgccgatgcgcagcctagcagcatgatggcggttcacacgcccgaccagctgaagcttatcaacggcgattggtcgaagaagaactgcctcggttgccactcacgtgatacgatcacggcactgaccgaggactacggcggggcggaggggtacaacccccacgctgcccataccgaggcgtacgattgcggcgtatgccattcgattgagggaacgtcggttctcgtgtgcaacacggcgtgtcacggcggctaccacggtgaaggcagtggttggccggttccggacgactggcaggagccgaccgccgaagtaccgagcgccgacgggtcgccgatagacacctcgaaggcgtaggttcgcgaagccgatctttgtacgaacgaccaaccaggcaacacgctgaatgcagggagccccgctgctgcgtggggctccccgtgcggttctcttgatgcttcttggcgggggccgggacgaactctaatcgttcttgaggggcagccaaacgcggacggtggttccctcgtccttcctgctttcgatatcgatgcgacccccatggcgcccggcgatccattgggcaatgggaagtccaagccccgtgccctgcggattgacctgttgcgcccgttcggagcggtagaaacggtcgaaggcgtgggcgatggtttccgaatccatgccgatgcccgtgtctgcgatgaccagtacagcgtacttgccttcgggagcgcactcgatcgagatcgtgccccctggttgggtgtaatggatggcgttctcgacgaagacggttgccagctcctcgagccgatcgcggtcgccgaggaccaacgcgcccttctcggtgctgactttgagctcgaccttttgctggatggcaagctgctcgaaaccctcgtgcatctgctctaccacatcgcccatatccacaaccgaatacatgtggtccaccacgctttcctccacctgggtgagcgtcagtagatccgaaagcgtgttgcgcatcttgtacgcatgatccaggctcgtttggagcgcgagggtttcgtcggctacgcggtgctcgggatggcgaagcaccatctctatgttggcgagcatcacggcaagaggggttttgagcttatgggaagcgtcggcagagaactgccgctggtgttcccaggcatcgcgaatgggcgccacggcgcgctttgccatgaaatatcctgcgggaatcatcgcaacgaggcttagcagatatgtcacgatgctggcgacgatcaaacgatggcgtggcactatctctttggtgatatcgcgaaacaacagtatttcctctacgtggtaggtttggtccccttcggtgatgggggtatcgcagagcgtatggtgcacgcggtagaaccgaccgtcgatttcggcggtcgagtcgccgaacggcatatcgcgcgccaacagcgtatcgatatcgttctgaggtatctcgtcggtagggtgcaggttcagaagctctccgtcggctgttttgatgtacagcacgggaataaacgacgtcgacaggccgtaggcgtgatcatccggcgactgatgctcgtcgatgaagacttgcgtctgatagtcggaacgcgagtcgatgggagcgagtccgaacacgtagaacagcacgttgaggatgaggagaaccgcgaacaagaccacagccataacaaggcagttggaaatcgtcagcttacgcgctgttttgcgggcaagcgcctcagtcagccttacctgcacgctagaagcgaccgttgtgcccatcgagcagcgcctttcccctcgggtctttggatcttgcaactcttgatgccgctaagcactcgcaaacttgtagccaacgcgccacactgtcaagaggtagcggggctcggaaggtacgggctccatcttctcacgtatcttgcgaacgagcaccgtaatgttgcgcaggtccatgccgatgctctctccccagatatgatcgaggatctgctcgcgtgtaaaaaccttgccgggcgaggaaacgagcaacgcgacgatctcgaactctttggatgtgagcttgacgggctgacccttgagcttgacctcgtatccatccagatcgatttcgaggtcgccgatgcggataatttcttggggcccctttgcgccgacggcatgagcggtttcggcatcgctcaaaacaggcgcatcggtattggaagcgcaacgccggatcagagcctctacgcgcaaggaaagctccaaagggctgaacggcttggtgaggtagtcgtcgcagcctgctctgaagcccacgctcttgtcgacgatatcgcttctcgccgacaagaagatgatgggggtgcgcacgccgcgttcgcgcaagcgcaagcaggtctcgaaaccgttcatgtagggcatggaaatgtccaggatgataacgtcagggcgctccgcatcgatgcgatcgagaacctcgaggccgtcttttgcgccgcaaaactcgaatccgtcttccagcatgacgcgctcgacaactttgcgcaggtcgccgtcgtcgtctgcgaacatgaccttcatgatgcgacctcccgttcaaacatcggtaccgctccgcgtcgtttacgacgtccccccgtcacgccacggtgtatttcagagtatatcagttccaaggattctgattgaagaggggtccaaacgaaaaccggcggttcgctctgacagcgaaccgccggaaccgcacgcgctaccgtgcctgtccgtaaagcttaggacagcaggtcgatgccgtgttgagcgagttcggcggcctgggcgacgatcccgtgctgttcttcgggatcatgggcgaccttgttgccgagcttgtgcttgccctcgacgtaggtcaggttgtagctggcacgagagtagtcctcgcgcgcctgatccagggcttcggactcctcgccagcggccgttgcttccttgagcatgtcgcccagctggttgatcagggcacgtgcctcttcgccctcggcgtagagctcggcctgggcgttgcgtacgaagtcgcgcatctgggcggcatcttcgacgccctgggcagtatggcagtcaagacaggtttcgagcgcctcgaggttgtcggtcaggcgtccagaggcgttgtggttggtcatcggctggccgttggcgttctcgatggtgggcatgtggcagtcgatgcaggcgagacccagattggcatgcgtgctgtcgtagaagatctccacatcgggatggcctgcactgaccttcagggcacccgtagcctcgtcgggacccttttccgcgctttcggcacctcgctcggcgtagatggtgtcgatatcgaagccgggggtgtagccggtatggcactggccgcacagaaccgtacctacgggagcatcgggaatgtaggtctcgcgcttggtgtcgaacgagcggatgccaggattgatctcgagggtctcgggatcggtgtggcagacgtagcaatcgaagaaggcattgatttcgggcacgagatcggccagcggcgtcgagccatcatatacctgagacagctcgtcccattgcgtggtcttgcaggacatgcagtcgagattggcatggtcccactgctgcatgttctggaacatgtaatagtggccggcgcggacgcctttgtcgacgttccaccctgtggtggcgtacgaagcgtactggtcggggtacatctgcctccattcctcgatggtcgccctctcgttggtagcagctgcggtgctggcgttgtcggcggcggccttcccggtgccgcttggcacgcacgcgctgatgcatgtaagcgcgagtaaagacgcggcgacggcagaaacgatcagaactttccccttgggcttagccatgtgaactcctcctttgtatcccatggtgcattacattttggaactacagacattttaggaagcgggggaggtaatactgatacctgctttattgagtataagttgcttttttatttcccaattattgacaccgccaaacggacggtggaaccctttttggttgcagggatttgtttcgattcgcgtgatgggaaggggcctggcgaacaaggggcgacccgcgctggatgatgcgcgggtcgccttgatgccgtttcggcatgtgcaggctgagggaggagggagacagcccgcaagaaatggtggtgttcgcctgctcggcgatgagcttcgagcgtggtgcccggaagcgtgcggctggcaggtgagcagccgcacgccgcagcgatcttacagtccggcgagcacgcggccgacgagcatgccgtgggtgatggccatgccgtggctgatgccgggggcgggcaaggggtagtccacgaggaagcggccgccctgcgtgttgccgaccgcataaaggccctcgatcggctcgtcttcggtgtcgagcacgttgaaatcgacgtcggtttcaagaccgcccatgttcacgaggattaccgtgtcggtcagcgggtaggcgtagaacgggccttcctcgatggggaacaggcgatcggcgcgcttgccgaaatcgtcgtcatgaccttttgcggcaagctcgttgtagcgatcgatggtcgcctgcagcgtggcggcgtcgacgcccatctgctctgcaagctcggcgatgctgtctgcggtcttgccgagtgcgttggcgccttcgaagtagctcgtgaagccgggggtgttgccgtcctcgttgttctcgagcgagatgtaggcgttcttgccgtacgagccgttcggaacctcggagccgctctcgacataccagttcacgttaccgtggccggtgtccatgtagccgatctgctcggtccacttcgagtcgaagatctgccacacctgtttcttgggggcgcgggagatctggttttgcagcggttggccgcccacatcttcgttcatgatgcggttgccgtaaacgtcggtgagcaaaaacgcgtccacaccgagcggtccgcccaaatggtgagtcatcggggcgtggggtccgtcttccatcttggcgccgatccacatgcccatctgctggccgtcgccggtgttggtcatctcgcccttcgcatcggtgttggggaaaatgctcatgaagcgcgcagcccacggcacgtagtgctccatcatctcgaggttcgaggcgtagtcgcccgttgcgagcagcacggccttcgatgcgttgatccttttgtaattgccgtccatgtcttcgacgatgacgccttcgacgcggccggtgttgtcggggcgtacgagctggcgggcgaacgtggagtacatgaaggtgacgccggcgtcttcgcagattttcaccatggcctcgatgtaggggccgttgtcgggcaggcagatctggcaatcgtcgaaaatggggtagtaatcatcggcgacgtttgcggtatcggggtgcggccagtgcatcttgcgcacgctcatgctctcgccgtcgtaggggtcggattccgcttcgacaacgtacttgccttcgctcggcgcgaggaaccagtcgaacgcttccccggagttttcggcccagagattcaggatgcgctggttggggcggtagccgcactccttcataagctgcgcgacgacggcgttcttgtcgatttcgatgccgaggtcttcctggatctttcctccgatgcagccgacttggtttgaacggtactgccatgtcgtgcccttttcgacgaccacgatgtttttggcgccgttttcaaccgccgagcgaacggcgctgatgcccgagatgcctgcgcctaccacgacgatctcggcatcgatggtttcggtgatgtcgctgtcggcaataggatcgggggcgacgaggaagcttgcggttccggcagaggcggcagccgatccggcagaagcagagccgcccgaagcgctgccggtttccttggctgcgggcgagcagcctgcaaggcctgcgccggcgatgactgccgccgtggcgccgaggccgagaaacgagcgacggctgatgccgtgcttggtcaagggggtttctttcatggtctcctctttctcttgaacatccctcaatgcaacgatcgcactgtatccgcctttcgcgccctcccgcaccgactaaaaaggttgattcatcgcctctcgatcaacatcaactgaaagggttgatgcccgacctcgggaaacgctgcaactgttgaaaggcggtttccgatttggcctgaaaaatccattacaataggcaggttggatatgccggacggcatcagggaggaacatgcgcggcttcttcgatacgagtcgaacgttcacggtgcggtatgcgggcctgagtttttattgggcttgggtatttttgtccttcaactcatccgatctgacggtgcagggcggctcccacgagatcctttccgttgtgcacatcgtatcgtcggcagcggccatggtgacgtttgcgattgcgttggttctgtaccgcaggatcatggcatgcgactccaagcgcatcggggtcgggctcgtggccggttcgctcgtttcctgtgcgggaaccgtgctttacacgtttccggggctggcgggaaacgatgccctgtcggtgctcggtgcggtgatatcgggccttacgtgttcggcaatcgttctgggttggggcgttgcctatcgcgatctggctgttcgaaacgccgttctgtttacttcgatgacgtttttcggcgcggctatcctgtactttgccgtttcgcatatgagtccagctgcttcgtccatcgccgtatcgctgtttccggtgctcgccgcgtcgtcgctggcttacagcctggctaaacaggggatgaatcggagcggcgagcctttggtggccgttcggccctcttggacgggcgagcttgcaaacctgttgcgcacggggctgtcgtggcgcatcgtggtcgggcttgtagccgctttgttcgtatgcgggggcatgcgcgtctatttcggcgatatcgcaccggtggtgtatcgcgatccggtgctcatgagcctgccgattgcgttcggtgcggcggtgttctttgtttacggcatgttcgtttcccgcgtaagcctcaatcttgggacgctgtaccgcgtggcgatgccgctgttcgcgctggcccttgtgctgatcgcgctgttcggcggggataacgcgtcgcttgcgttcttcatgatgtcgacggcgtcggtgctgttcgagattcttacctgggcgctgctcgtcgagataacgcggacgacgcactatccgccgctgctcatcttcgcggtcgggcggcttgcggtgcatgttggcatcgttgcaggcgagctgacggcctttgcgatgatcggcgatctgatggtcttcgccattctggccatcggaatccttttcgtatcggctggatttacgttcgccgatcgcgatacgacgtttctgttcgagccgcccacgcccgaggagcttgagcgtcttggcgtcccggtcggcgacggtgcttcggcgtcgggccgccccaaagccgaacccgcggtggaagcggatgtgcttggccagtgcgaaagcattgtcgacgaagaccttctgatccgtagcaatctaaccagccgcatcgatgcgatggcgagggagtatggcttttcgcctcgtgagaaagaggtgttcgcgctatgggtgaccggacgcggatcgaagtacatccaggagacattcgtgatctcggaggccacggtcaaaacgcacgtgcgccacatctacgagaaatgcgacgtgcataaccgcgccgaactcatgagcaagctcgagaatattcccgtatagccgcgcgtggccgccgtatacggggctgcggcatgtggcggcttcgtgctgcggttgcgcttgccgacaaccgctatcttccttctggcttttcgattcgcttgccggtgatcctttctatttcgatgcagtatgcctcaaacgagttgagggcatgggggatgccttcttttgccgcgttccagcctggttccggaacgaatttctcaacaagcgattcaagcgtctgtcgctttaattccgggcatgggcgggctgttccgaacgcgatggcgctgcgcccttcgaccgcattctccatttcgagtaccgcgaaagcgacgggactgccagggcgcaggccttctgctttgtggcttgcgccggatgtgctgtgaaagcagatgcgattgtcgatcatggcgtaatggagggggatgccgtaaggaaggccgtcgccgtcgattacgctcagcacaccgaagcccccgttgtttaagatcgatcgagtttcttgttccgatagcgctcgatcgcttcgccgcatggttcgctgcatgaaaatcctttctctcggatggcgtgttgccggatttccggatttccggattgccgggctgctgggctggcaacagcgcccactgcttttttcgttcatttttcggcagcgaggggattggcgcaagaatcggattgctagaatgcaacaaaacgtataaaaatgttgcacggtagacagcgctttggacatgaatcgggggcgtggatatgaaaagaacgccgacgaaagacgcactcgcttatgcgttgttcgatttactgcgtgaaattccctatggctcagtgacgctttcgcgtcttgccgaacatgcgggggtgaaccgttctacaatctatcgcaatttcggcgcgttggacgagatcgtgctttatcgcattgccctcgttctcgatcaatgcttggagcgtttcgtggtttcgggtgattgcagcatgacgggctacttgcttgcgatatttcaggttctggattcccataaggaagtgttcgccgcattggcgaaaaacaggctcgactttctgttgctcgacgcgcttcaggcaatgttcgaggcggcggctggcgaaaccgaattgtccgctgcccagcaatatcagctgagttttcacgtgggaggcgtgttcaatcatatgaggctttggatatcgtgcggcatgagcgacgctcccgagtcgttggccgattgtgcgtcgacgctcttttccgacgatttcaagccgttgcggttgcagctcatgagcagatccgagaacgtctccgcgtgatcgtggcgattccgttgccgtatgtttgcggggatgctgccggcgtccgctatcttccttctggcttgccgatgcaccgagtggcccgaatcttcgggttgccgtcgggttctttacaggctcgatagctctcgctcggaagctcgaatccccggtttgccgtcgggtgcttcgcagggctattccaacggcggccttggcagctaaagcgcctcaaactgcacaattttcgccagattcatacattcaagatcattgtttcgcttgatgcgagatctagggctctgctgatctgggtaaatgccttagggtttcgaagaaattagacttcagagcctttcgcatgtatgaatctggcgaaaattgtgcacatgaacccatatccgctgccaaactgtcgctggcatgctttcgcacggcagcgtaaatcccatttgttgtcgggcgcttcacggaattacatcagcgatggcttggcgacggcttcgaatgcggatgcatgcgagtgcttgctttggcagtgcgaaggcctctgcttgcgcgctcccatcgcgcgatcgcttgcgctagttctgttttacgaccagcacgtcgcagcgcatgttcctgatgaggaacgtcgagacgcttccgacgaacgcgtacttgatgttcgaaaggccgcgctcaccgcatacgatgaggtcgggatcgaacggttcgatcatctgctcggcaagcgtgtctgtgatgcgaccggcgcgcacgatgagttcgaacgaggggatgtcggggttgttgcgcgcctcttccagggtgtcggcgatgtcgtgttcgagccgggcggaaacgtcttcgcacagagccttgaaatcggtgcccgacgcttcgtagggaaccgagtcgatcacatggccgaacgcaaggtgcgcatggttgtcttcggccagcgcgatggcccgagcggtcacggcttcttgggttgatccgccgtcgagcgctgcgaagatgcgggtgtaatgttgagccatgggtcatccttcctcgggcatctgtcctgagccggcgatcgcctgtcgttcgaccgccgaaaacggttggggatattgtagcgctagtgctcgcccgtctctatctcgcggcacatttcgatgatgtcttgtttcgaatgcacttcgagtttacggtagacgttcttgatgtgcgtcttggcggtgttctcggagacgccgagcgaggaagcgatgtcggcgaccgagcggcccttcgatagcaggccgagcacatcgtgctcgcggtcggtcagatcgtgctgctcggccaatgctgcgcaggtggcctcgcgagctgcgtcgagggaggtatcgggcggggaagcgagcggggcggcggacgggttgccggctgcatcgacgggcgcaacggcacgtgcaggcccgctggttgcgggcgccgcaggcgggaatgcggaaacgaccgatcggcgcgcgtcgctcgctttcggttcgggtttcttgcgaaacacgaacagagcgatcatcgaaagcaggtagagcgagacaagcgaaatcgccgtgatggaaagatcgccctcggtgagcgttctgccaccgaagtatccgaacgctttgccgagcgctccggcaagcgatgtcgtgccgagagcaaggccgaaacttgtcgttgcgctcagatcgtgtcgtcgcgaggtgtcggcggcgaggcaccacagcacgatgcccgcagcataggagcccgcccccacaaatgcgttcacgattccgccgaaaccgttccatatgatgggcagcagcagaaagcccgtcgccacgatgggcaggatcagcttgtagatgttctccaggcgcatgttctgcttgagcacggctacaggggcgacgagcagcagaagcacgacggcgctgcttgcgagcgagaacaggcgcatggtttcgatagacccgtcgtattgacccgatatccagggcatgaggccggtgaggaatgcgaataccgaggtgccgaagatcgggcgccacagctcgctgaacgctgatcgcaggcggggactgtcgaaggcgaccgacgaccggtcgggcagtttgatcaggatgattgcgacggcgaggatcgaggcgatcacggcgaagacgagggcgatgctgggaatcacgaacgtcaccgcgtacaggacgagcgcggcggtctggcttccgagcacgaacagatatgccgtgcgaagcggcagcgcggcgcatagcctgccccatgagatgctcatgagcgcgtctcccacgccgagaagcgtgcccgcggcgatgagctcgataagcgttgcgaacgagatgtcgccgaagcttgctgtcgaaccaagtccgggcatggccaggatgccgacgatgaacagcacggcgcccaccttgccgaattgacgctgctttgaggtgctcactagggaaaagaagaagcacccgaagtagccgaagcctttgctgagcaggcttaccgtcattacggcgacggctatttcctgcgaggctcccaaaaggccgggaaacaggatggtgccgtggaaacagatgagctctgcgaagagaaacagcgaaaacccgagcagtctcaatgccatcatgctcgcatgccccgcctgttctttaccgcggaaacgagctctgcgcgcgaatggacgtcgaggtggcggtagatcttctgggtgtggtatttcaccgtgctcgcagacaggtagagatcctgggcgatgcgcgggatcgtgcgtccttcgatgagctgcatgaatatctggcgttcctgatcggtgaagccaagctcgtcggcgatgtcgtcgagggttgcgggcttctcgctcgcggatgcggtcgctccgtctgcgggaagaggcgtttcggcatcgggttgctgcgcgtcgcggctcgcccgctgtcgccccagaaacgatgatgcggcgatggcgatgaggtagaggcttcccagcccgatgagggcaacgcccgcacctgcttcggaaagccgggtggcgaataccgagccgatgcccgttccagccaaaaggcaggaaagcgtcaaggtgtcgcttcccgcgaaaagcggcgccgaaggcacgtcggccgcccgtgcgatttctgcgatcgtgcacgacagtatgatgccggtaagcatgtagccagtcgttgccaaaactccggccacaggggtcggtatggcggaaacgagtccgggcagaatgagaaagccaagagccgagagggggagcgctatcttgtagccgttttccagcttgaggggctgatgaaacgcgagtgccggaatcagcatgatgacgatgacggcggcagatatgcccaacacgaagaactgcatgcctacaggatcgagcggatcggaagcatggctcgcaaccgagctgacgaaaccgctgaggaatgcgaaaacgccgacggccagcacgcccttccagagaaaaggcgcaattcctttgatttgggaacgggccgtatgcgcatgggctctaagcggcggaagcataaccgcgcagatgttgcctccgatcatgcatacggcgagtgcgggtatgagcagcgaagacggcaaaagcagcacgagtgcgcagagcaccgttgccgcggcatggcttgcgagcagatacagatagctcgtgcggtatgtgagcgaggggagcgtggtcagccatatgagccccatgattccctgagcacctccgaacagcatgcctgccaggacggtcggtgcaggcgacgcttcgcttgcgcttccgatggcaagcgcaagaccgatgcaggcgactgcagtggcgatagcaggtgcgaggcggcgcggcaggggattgcgcagcagccgcgaggcgaacagcgcgaaggcaaggaagacgattatgcgcgaagcgatagaggcgtaggaaaacgcttctgcagcggattcgccgagggctccgcctccgatgagggccgtgttcgaatggaacgccagtatatcggcgaacaggtagagcgaaaaccctgcgtatggggccgtgatcgtctgcttcatggtgttgctcgtttgctgcggctcatggtgcagcgtactcttcctcccgtggatgatcatcccatgatacaggtgaagcggttttttcgccataaagcgcctctcacctgatcagccgttttgaaatttagccgtttcgggtgaggtgaacgagcgcttttcgaggctttggatccttcgggtgatgacggtttcggtgctcgttcgtaagctaggggttgttatcgggcaggcagacggaagggctgcggatcgcttgaacggagaaggcggtcggatgcccgattgtgagaaccgatcatcgaaaggggatcattatggaagaaaagaaactatcgcgtcgagcatttctgggactcggagcgacggcagccgttgtggcgggtgccggcatcgccgggtgcgcgccggcggccaaagagggcgcgagcgctgctgccggttcgggcgatgccgcagcatcggccgctgcgaccagcaacccgaccgagttcgtgccttcgttcatgaacgctcccgaaccgatcgacgagtcgaaagtcaccgagacgatcgatgtcgacgtgtgcgtcgtgggccttggccttgcgggcgtttgcgctctgcgcgaagcagccgacagcggcgctaaggtcatcggcatcgataagggtcccgatgtgggatatcgctcgggcgagttcggcacgttcggcagcgagatccacaagcagctcggcatcgaacagcccgagacgcaggaagtcgtgaacgagctcatgaaggtcatgggcaaccgtcccaacgcgcagcttctgaactactggatcggcaactcgggagccgacctcgactggtatatcggcactgccgagcacgagctgctcacgagcgattccgatacgccgaccgaccccgagaagccctacgtgtttcctgagcgctgcccggtgaacgagaactacaactggcgtgaggagaactacccctgcttccccggtatggtgcatctgcttcccgatcacggatgggccatgcacggtacgctcgaagccgctcaggcctccggcgccgaagcgcgtttcaacaccaagggcgagcagctcatcaaagagggcgacaaagtggtcggcgtgtatgcgtccgacgaagacggcaacatcattcgcatcaacgcttcgaagggcgtcgtgctttccacgggcgacatctcaagcgataccgagatgctcacctactacgcgccgcaggcaacgaagtacggcgtgttcttcagctcgatggataaaaacggcaagcccgtcaataccggcgacggccataagatggccatgtgggcaggcgctgtcatggaggacggcccgtacgccccgatgacccacagcctcggcaccaattccatcggcatcgatccgttcctcatggtgaacaagctgggccagcgctttgcaaacgaagacgtgggagcccaggagcttcagaaccagatcaagcgccagaaggatggcatgacttaccagatcttcgacagcaagtggaaagagcagctttccgttatgccccagtgcttcggcggcgtgacccactacattccgcctgaggaagaagagcagtacgcgcacgccatcaaccatttcgctgccggatatgcttccgacggctacttccagggcgagatcgaggccggttcgatcatcccggccgattcgatcgaagagcttgccggcaagatcgaggtacccgccgacgcgctcaaggcgacggtcgaacgctacaacgagcttgcgcacaagggcgtcgacgaggacttctcgaaggtgtcgacgcgcctgttcccggtcgagaacccgccgttctacgcggtgccgttcggcgattcgggcatgctcgtgctcatcggcggcatcgattgcgatcccgatttgcatgcgctcgatgccgagaagaacccggttcccggtctttacgttgcgggcaacacgatgggcggccgcttcctggtcgactaccctgtcaccgttgcgggcgcgagccattcgatggccatgtcgttcggccgcctcgctggacgcaatgcagcagcagggaagtaggtttcgcctgctgcgatagccgcaatgcccgaggccgacgggtgtaacggcagatggatttcgaagccccgctgccaaaagaggcggcggggctttgcgctgttttgggaccggccgcaacacttcgggtttgcggaggcggcttttcgtcctcatccctccctcgggggtggtggtgcacgctttttgccgatgtgttgcgtttggcatcgcgtcctaccgactaatggagcatattatatattttgaactggggaaacgcttcatgctgacaggaagcaagccggttgtggggcgtcgatggccttcaaaacgtaacacttcgatgatttttgctcagtttggacccccgcccatttctgcgaggcgaagatcccctcgtcggctgttgcgcgcaaggaggcgccgcttttttgcgctgcatccacgcatttccgcggatgggcgaatcggattgactttcttgttgtcccaaacttctctgcgagggtagaatatgtccggcatagtaatagataagcaaggaggtgaggtaccatgaagacgatcgaaaaccaggtgtacgcgttctcgaaggacaacgagccgtgcgagaccgtgcagccaggcgaagtgctgaagttcaaaacgctcgattgcttctccaacaagataaccggggaagatatcaccatgaacgatttggattacggttacgacgttgcgaacccggctgccggtccggtgttcatcgaaggtgccgaggcaggcgatgtgctcgtcgtggacatctacgatattcaggtcgccgatgagggcaccgtggcgaccgacgaccattgcggaccgttgttcgagacaacgggctaccgtaccaagaagatcaagatctctgatggcatggcggatttcaacggtgtgaaattccccatagatccgatgatcggggtcatcggcacggcacccgacggcgaagacgtcatcgacggctacgtgggaagccacggtggcaatatggacaacaagctcatcacgaaaggcgcgcgcctgtattttcccgtacgggttcccggcgcgcttctgcagatgggcgatgtgcatgccgcaatgggcgacgccgagctgtgcggcacgggtatcgagattccagcggaaatcacggtcaaggtatcgctcgttaagggattcgagctcaactggcccgtactcgaaacgcgtgacagctggtatgtaaacgcgagcgcgcaggagtacaacgaggcgctcgtcaacgcgagcaaggaaatgcagcggcttttgatgggcgtcaccggttgggatcccgtcgaaacgtacatgtacatgtcgatccaaagcgacgtggagatcaaccagggatgcaagccatgcgaggtgcagctgagcttgcggctcggcacgccgaagctgccgcagttcccgccgctggttccgcagccgtaaaccattccgatcaatgaaggaagaaaagacaatggaagaaaagaaatcatcggcgacttcgactcaagcagccggtgcggcgcgcggtgagaacatagagcaattcggctacaagcaagagcttcgccgcggcatgggcctgtgggacgtcgtgttgtacggcgttttgttcatggtcatcatagccccgcagtcgattttcggcgccattcagcagaacagccatggcatgacgccgcttgtgtacatcatcggcttcatcgccattttgttcacggctatgagctacatgcgcatgagcaagcgattccccatcgcgggttccgtgtactcctacgtacaacgcggcatcaacccgcatgtgggcttcatcgccggttggctcatcctgctcgactatattttggtgccgggactgctcatcgtcatggtgatgaactggggcgtggcgcttgttcccggcagcccggcatggctgtggggcgtcgccttcatcgcgttcaacacgtttgcgaacattcgcggcatccagatgagccgtggcgttgactgggttatcttcgtggtcgagatccttgccgtcatcgcattcgttgcgctcggttccatgtttcttatgaacggcggtgcgaacggcttcacgatggctcctatctatcagcccggcgaggtcgatgcgcactttgtagccgcaggcatctccatcgcggcgctgtcgtttctcggcttcgacggcatgtcgacgcttgccgaagagacgcacgagcccgagaagaacatcggccgcggcatcctgatcgcgctgtccatcatcatcgtggtgttcgtggcgcaaacctatatcgccgccgccgtccagcccgactgggcgagcactgatcctgacatgggatttttcgactccgtcatgatcgttggcggtgagccgttctacaagatcatgctcgttgtgaacatcgtggctgtcggtatcgcgaacattatgaatgcgcagatggcgtcttcgcgccttttgtactccatgggtcgcgacggcgtgatcccgcgcgtgttcggcaaggtgcacccgaagtaccaaacgccgtggttttccgctgtgttcctcggcgtggttacgctctgcctcgcgctgccgctcatggaccgcatgagcgatctcgccgagttcgtgaacttcggcgcgctttcgtcgttcatcctcatcaatatcgccgtaatcgtgttcttcttcgttcgcgagaagcagcgtaagacgttcggcgatgtgatgaagtatcttatctgcccagctatcggcattgccattctcgtgtacgtgttcacgggctttgcgttcatgacctatgtggtgggcatcgcctggcttgtcatcgggctcatcataggagcgatcaaatcgaagggctacaaagaagtgcccgatgccttcaagaacctggaagtgtaggatttccggggcaacggggcttgcgagcgcgagggggaaggcgcatgcgatcgaggaccaaagcagcctaccctagctcaaaagcccgcctcttcgaatcgaataccggttgcacgagtcgcctgtcttgttgcgggcgactcgcttgtgtattctatcgagtgcatgaaacgagcagaggagcagcgcatggtgaacgagaagatgtacgatctgggaagcgagccgtcggctatacgcgagctattcgcctacgggttggcgcgcaaagccgagatcggtgccgacaaggtattcgatttcagcttgggaaacccgagcattcctgctcccgatgccgttaaacaggcgatcgtcgagctgcttgacgagcctcccatctcccttcacggctacactcccgcacagggaacgccaggcgttcgctcggcgattgccgattcgatcaaccgtcgcttcggcatgaaggcgacctcctccaacatttacatgacagcgggagccgcggcttcgctcgccatttccatcaacgccgttgccgacgcaggtgacgagttcatcgtggtcgcgccgtactttcccgaataccgcatttggatcgaggcggcggattgcacgtgcgtcgaggtcatggcgcgcgagcttgatttccagctggatctcgccgccatcgaggcagccgtcacgcccaagacgaagggcgtcatcgtcaattcgcccaacaatccggtgggctcggtgtattccgaggaaaacctgcgcggtttggccgatgttctgcgggtcaagcaggaagaattcggcagcgtcatctacctgatctgcgacgagccgtatcgcgagatcgtctacgagggtgtaaacgtaccctatgttcctgcgctctacgacaacacgatcgtatgctattcgtattcgaaatcgctcagcctgcccggcgagcgcatcggctacatatacgtttcggagcggatgcccgaatggaaccgcgcgtacgctgccatatgcggtgcgggccgcgcgcttgggttcgtgtgcgcgccgtcgcttttccagggggtcatcgagaagtgcgtggacgtgccgaccgacgttgcggcatatgccgagaaccgcgagcttctgtgccaaggactcgccggcctcggctacgaatacgttgagccgcaaggggcgttttacctgtgggtaaaggctctcgagcccgacgagcaggcattcgctgctcgtgctaaagagcacgagcttctactggtgccgtcgacgagcttcgggtgcacaggctatgtgcgcatcggttattgcgtgagcaaagagaccatcgccaattccatgcccgcgttcaaggcgctcatggaggagtatcggggctagcggttacgcctcactgaggtcagcgaggcgtagggcaaaccaattgaataccgttcgcacgcttcgcggaagggagcgccctttctgggttatggccgctatttcccatgtgaattcgggtccttcgagtggaatggcgacaatgccgttctggcagaaccgatcgatgcgatgtttgggaacaacgcaggctcccttgcggcgcattacctgatcgaggatgaggtggtagtcgcgccagtcgaatgacatttttaggttgagatcgtgttcggcggatagcttgatgagggctgagtcaaggggaaacgtttccgacaacccaaaccatgtaagacctttgaggctttgaagggtgtggctcttctcttcgggcaagagcgattcgtgagccgcggcgaatagcgaaacatgcgcaagcgacgagcaggtggtgtgcgcgcccgacaatggtccgacgacgagcgctatatcctccttgccttcagcaacgcattgttcggcgattgatggttcgattgcgtctatttcaagctgaacggaggggttttctgcgtaaaattcctcaatgaactcgtcgaagggaatggaaacgagcactccgtatgcggcgcagagccgcactgtctcctttgcctgctcgttcccgtcgcagagaacctgaatatcttcgtagatgtcgagcaggtcaacaactttaggatagattgcattggcgagctcggtcggctcaagaccttgagggtttcgaacgaagaggtcttgcctgagctccgactccagccctttcagggtttggcttaagccttgtcgagtgaggtacgcgcgcttcgccgcttttccaacggttttatcctcgtacgccagtcgaaaacattgaaggctgcgtatatccatgtaatccccttgcgttagcgcgcatcggcatatcccctcgatctattatatcaagcgggtttcaacagagaggttatttggggattgagggacgaaagcaactattgcggggttgctagggatcgtttcttttgctggcttcttctgggtgattccatggtggaggacttcggttgtcctatcgagattgtacgggacgattgaggggataaagaagggcatgacgtcgaaaggggaagctatggcaaagaagacaggaatctcccgtagaaattttttacaaggacttgcggtcggcactctcagcgcggggactctggcgttgagcgggtgcggcggtacgcctcaggagaacgctcagttgaagaaaagcaatggagccgccggttcggattccgttgccacgagcggtatggaactcaatccacaagactatagctatacgaccaattccatcgatgatttcagcaagacgacgttgttttccgactggcagctcggtccgattacgttgcaccatcgtatggtgaaatctgcagcattccagttggcgttcatgaagaacaaccccgatgagtacataggctattatgcgcggatggcagagggcggggtcgagatgatctgggtcgaagattttgcgaatatctgggatttcactgctagcccacttaagcaggattatgcgctttacgacgtgaaggggcttcttgatacgctccatgcggccggggcgcatgtgggataccagtttgatacgatgggttcgcccatcggccccctcgactttaccgaaaattttgttggccagtactcgattgatgaggtccgcgaatgggtgcaagtgatcatcggcatcgccgaacagctgcacaaggacggattcgacgcgttcgaattgaattttgcggctaacaacgtcggccagtcgttcttgtctcgggctcgcaacgatcgtacggacgaatatggggctcagtcgctcgagaaccgtacgcgatttgccgtcgaagtgattcagggcatcaaagaggcatgcggaaaagattttatcgtgcaggttctgatcaacggcatcgaggcgaacgataaagctcttggggctgattcgctatacacttcgcttgaagagacaaaggcgatcgcgcagattctcgagagagcgggtgccgatagtctccatgtgcgtcttgggccctgcgggcagcatatcgctcagttcgctagcgagctgtactttgccgtgcgtggccttgagggggcgaatggatttggcaaccgtttcgatttctctcgccattttcaagggaaattgcgggcgaatcattcgggatgcggcatcatgatcgatgttgcgagcgaggtcaaaagcgttgtttcgattcctgtgggcgcagcaacgtacatggacccagcacaggctcccgattacttcgaagaggctctttccgagggaaagctcgacttccttgtgatgaatcgccccctttgcgtcgatccagaatacgtgaacaagctgcgcgaggggcgtatcgacgagattgctccgtgcacccgttgcctacattgcttctacgatcccgacaaggaaggaaagctccttgagcattgtcgcgtgaacgctgcgaattggcgcgcttatggtgaggatatggccgaaggatacgctcctgcgcctatcgatggaagcaaaaacgtcatggtcattggcggtgggcctgctggtatggaggctgctcggattgcggcgcagcgtgggtgctcggtcactctgtatgagaagagcggtgcgctcgggggcttgctttcgttagcagaagccataaagggaccgcacgaaaatcttggtcgattgggttcatacctttctcgttcccaagagatcgatggcgtgaccgtggtgactggccaagaggttgacagggcattcatagagtcagagggacccgatgcggtcatcctcgccgttggcggtttgcgtcaagagcccgaattctcctcgacgaacggcacgcaagtcctttcgtttagcgatgtagtgggtgctgatatgggggatcgcgttatcgtgctgggcagcaactgtcaatccgtcgacgttgccatctacctgctttcgcttggcaaggatgtgacgatcgtcacatcggatccgatggacgctttcgaaaaaggacattccgttaacatgcgtcatttcgtggaaaccgccatcaatgctcgcggggctcgcatttggccttcggctgaggttaaggaagtcggagatggcgagttgaggctgatgagtgaggcgggcgtcgaggttgtcgttccgtgcgatgccgtcgttgacatgcgcgacatgctgccgaacactgctttgatagacggactttcgggtatccaggcagtcgctgtaggagattgcgccgacccgtacaacattgcggaagcgatttcgtcagcgaatctggcggctcgcggcatttagcgctcgcattgcaaaattcttatcacgaatgagatgggatcgagctaaacaataagctgtgtaccgtagagcggattgcgagggctttcgagatgaggctcgaaggccctcgcatgcggcgcttctacagaagctcgatgagcgcatcgacgtcctcttcgcgcgttgcccagctcgtggcgaatcggacgacggttcggtcggcatcgagcgcctcccagaagccgaacgacacctgcttcgacaaatcatccatccttgcattgtcgagcacgacgaactgctgattggtcggcgagtcgatatggagcgcgtaccccgcatcgatgagcgccgccttgagtttcatcgccatgtcgatggcgtgtcgcgaaatgtcgagatagcggttttcggtgaacagggtctcgaactggatgccgagcagcctccctttcgcaagcagcgcgccatgctgcttcatgagcgtgaagaagccttttgcaagctcgggcttggtgaagacgaccgcttcgccgaacagcgcgccaaccttcgtgccgccgatgtagaacacgtcgcaaaggcgggcgatgtcggcaagcgcgagatcggcgccttctgcagcgagtccgtagccgagccgcgcgccgtccatgaacagcgggagcttgaatttgcgggcaacgtccgagatcgccttgagttccgagagcgaatagatcgtgccgtattcggtaggatgggagatgtacacgaggcccggttccaccatatgctcgtagttggcgtcggcgtaaaacgtcgtgcagagcgaatcgatcgcttcggcatcgattttgccgagcgtatgggggatcgtgatcactttgtggccgctcgcctcgatggcgccggcttcgtgggttgcgatatgccccgtatccgccgctaaagcgccctgggtcgagcgaagcagcgcatcgatgatcgttgcgttggtctgcgtgcctcctacgaggaagaacacctcggcttcggggcacccgcatgcttcccgaatcagcgcacgggctcgtgcgcaataggcgtcggtgccgtagcccggcgttttctcctcgttggtttccataagcttttcgaggatcgcggggtgcgcgccctccatgtaatcgctgtcgaagtgctgcatgatggccttttctcgttcgttgcgtttcggccgatctcttcggccgctgcgtttcggttgcgttctcgcgtacacacgaccagtatactcgagtaccgcatgacgggtgggttctctacgatgtgtactgcttcatatagtcgaggatttcctggcgcgaatggaggcccgtcttcgcgtagatgcgcttgatgtgggcgtgcgcagttccctgactgatgcagagctcgtcggccacgcgcttctgcgtgaagccgagcgcatagagggaaagcacttcgatctcgcgttcggaaagcaggaactgcctgcccatctcctcggcgttgtgctgcatggttgcctggcgcatgcccgaaaggctttcgttgctatcgagtcccatgatcttgacgagggcgctttggcgcgaggtgatcttctcgtgctcgtcttcgttttcgcgtttcgcaatgtagatgaactggacgaataccgattgggcggaaattaccaccagcacgcccataagcgtgccgacgagcatgtcgtttgccgagagagggtagatctcaagcaggacgatgcgcgcgacggccctgctgccaagccacacaagccagcaggcgatggcgtagtagtacggatctcgccatccgtagctcatgaatgcgacgacggcataccaggtgaagccgaccatcatggcgttgagcgtagtggtgaacaccgcaccgatatcgaggctttcgggaaacgctgcatatgcgaccaaggccaggcaggcaagcgtttgcatgataatccaaatgccgacggtcatcacctgccccttgccctttaccgcgaacacgatgatcgctgcggatagggccatggtcaacagcatgtaagcgacccgcgtcgcggtcgaaaatgcgatgggggctccgtcgggataaccgcgcagcaggccgatcacaatcgagagcagtccgatgccgattccggtgactgcgagaaactgcttgttggatacgagcgattttgcaaatccgaagtagtcgtgcgctttcgtatcgggcggagcgagaagaagcttgctccgattgcgcgatgccacgatgcagggatactgcgcgacgacgaacagggcgccgacggtgtaggcgatcgcgtggggcaaaagagcgcagatgtagatgattatctcgctgaggagcagcgcggcgaacacgtatacggcggtgatggtggttgtcgagccgcgcgccctgcgaagccagtagtacagggcaagggagccgaacagcgtgcacccggcgcacagcgcgagcttgatcccgtcatgctggatgccgagcacctccatggcggtcagcccggcaagcgtcgccgcttcgagcgccgtgcttgcggccatgagcgcgccgacctgctttctgctgcacttggttttgcgcaccgccgagatgatccaggagattcccagaaaggcgagcgcgatgagcatgccgccatcggtgaacacgccctcgtcggtttgcgtatagctgccgtagctggctacgatgaggcccgaacgcgcgaatgccaatccgagcacgaagggccaaagcggaagataggctttgaagacgtcggcgaatccgcttttgcccggaatctgatgaatggtttcttcctgctctcgttctgccaaaattcctcccgtttcatttggcacagcgggccgatgctcatccccaaaaggctcggcagacatccattgtagtgcgctttcggttttataccggacgcgcatccacgttgtggctgaactgtttatacaggtagttgccgctttagtaaacgggcaaacgtgaaaatatcctcaaagaggggatggtggtttttggcgttcggacatcatgggaacatcgaaacgagcggagaaacgaggagcacgtgtcggaaagaaacgtctatatcgaacccgaggagcgggcggtcattcgcaccgccgacgtctatcaaaccgaaagcgaaatagggacgacggggtattcggacaagctcctgtcggttgtcgcgacgttcagcaacagcggcgcgccggaagggttcaacgcgcagtgcatggtgggaaaatcgaagcgcggagaagttgccatgcgcctgttcgccatcgtcgatcccgccgaggatcggtttgtgcgcgttgggttcaaatcgcgcggatgccttgccatgacagcatgcgcgagcacggtgtgctcgatgctcgagggaaagacgctcgacgaagcgcttttcgtgacaggcgacgatatcaaagaggccctcgacggcgttccgtgggatcgcattcataccgtgtacttcgccgttgaggggatacgggctctggtcggcgattacctgatgcgccagggtgcggatgtcgacgagctcgaccgccgcgtgccatgcgatacctgcggcgtcggatgcatcatgacagagcattgctcgttgcgcgacgggcgcatcgaattgcaattcggacgagcagcagggtaggttgccatggaagaagagtttgcggtgctgcaggaaggcgcggatgcggcaggtgtggagcaggttcgcgaagaggatttcacccctgaggaaatcgccgcctttgaagagtccgatctgcgtcatgcccttgcgttgcttttcgaagcggtgcgcatctgttcggccgacgggcgtctgtcggcgcccgacgagtgggaagaggccggcgtcgttccccctcacctgagcgccgaggatttcgagatgtacgtgtacgactaccttgaggggcgcagtgcttcgcttaaggatgaatcgtcggcagaagagcctgcgacgacgtatcggacggcgacccgtgccgtcggcgtgccccagcccatcgccgccgcttcatgcgagcgcgctgcgggcgaggatggcgaagatgctcctgaaagcgaagacggcgaagcttcggttcggtttgacgaggctggtgccgagagcaggggggaaggcctcgacagcgacttaggcgaccgaggcgaatgcgagcacggcgaaagcgactgcagcggcgatagcggcgacgaactcgggttcgatgttcccgagggtttcgagctcgttgaactcgaaggggagttgacgctcgtgccgatcgaaggcgcggacgaaaccgatgaaatcgcatgcgacgacatggccgtgctcgttggcaagcgcagctactatctgtactcgagagacgtgatgaccgaccgctacgcgcattgggcgtttctcgcacgggaggacgatcgcatcgtcacgttcgtcgaatgcgttcgggacgagtcgagaacctacccgcgccccatgtcgatcgacggattgaaaaacgaaccgttcagtatgaccgacgaggagattgtcgagacatgggaggcgatcaaggaatcgggcgcttatcccgatatcgaaaccactgcggcatcgaacggcgatgtgttcttctattcgacggaatacctcaaccccgcgtatgccgcatcgctggctgaatggcatgcggtcgagcgggggatgtacctctgatcgcccggccggcgaaagggctttttgcgaaacgcccgacaatgatatgatcttggatgcacggcccgctgcgcccgcgcgaggccggtgctgcgttgccgtcgagcgaacgggaggcgggacatgtctttgggcaggcgaacggttcgggatgcggtgtacggcgttgccgtgggcgatgcgctcggcgtgccggctgagttcaaggcgcgcgatacgtatcgcatcgagggaatgacggggcgcggaacctacgataagcccgtgggaacgttttcggacgatacgagcctgacgctggccacatcgaacagcattcgcatctgcaagggaatcgacatcgacgatatgcgcgagcggtaccgtgcttggctgcgcgatggcgcatacgtgcccgacggtgaatcgttcggcgtcgggcgcacgacggccgccgcgctcgatcgcggacgcggtctcgatggcgaacgcgataacggaaacggctcgcttatgcgcatcgtgccgctcgccttcgtagacggggtgaccgacggccagatcgaagcggtatccgccatcacgcatgctcatgcaatctcgaaacgagcctgcgtcatctacgtgcgaatcgcgcaaaggctgcttgcaggtgcatccgtcgccgaggcgatcgaaagcgttgtcgaacccgaggcaaagcccccgttcgatcgcctgtcgtgcatcgcctgtctttcgcgcgacgagatcaggtcgagcggctacgtggtcgatacgctcgaggcggcgctgtggtgtttggctgtcacggatcgattcggggatgcggtgctcgccgcggtcaatctcggcgatgactccgatacggtgggcgccgttgcgggcggtcttgcgggcgtcgcatacggatacgatgccataccgagcgaatggattcgggcgctgcgcgggcgcgggatgctcgaggcaagcctgttctaagggaaaagcccccgttcaacgggggcttttcacaagaaggggatttcggcgggtctctttacggcagcagcccgagcgattcgaggtcttccttcacgtcggtcatgccgtagccttcaaggcattcggccgtggggcagccaagcgtttcgtcccagccgaatttgccgtacaccatggtgagcgcggtctggaaatcgtcgcgatcgattttgatcgtgccctcggtgaagggttcgaaatcggggtcgtgatcgaatacccaatcggtgatgcgatcgtgatcgttgcgcaggtcgttgttgcctatcgagccgtcggccttcgtcatgccgcgcacggtgttggcgcgttgcagcgtcatgatgcgggcgccggccttgtacagatcgtcggtcgtcacctcttcgccggtgacagccttgtagaatttcgcttcaagatcgaggtcgccgcggtaatcgcgctgcttggtggggctcatggtcatcggccatacccagttgcacagcgtgagcgagtcgtgcagcacgtcggttacgatcgaccaccagcagaagttcgccttgctatcgttcatgggcgtgtagttcttgtcgggatcgattgcgtcggcgccgccccagacctcttcggctatctgctgtttgagctcgaagggcaggccgcatccctggaaattcacggcggagtggatcatgtcatcgcggttgaacatcatgttgtaaacgccgcccacttggccgaagcattcggttgcgtggtgcacgggccagccgcggtagttgatgagcgcgctcggcttctggttgaaccagtcggtatcgtcccagcgctcggcccagacgtagggtccgtaggcgaggtaggcgatttcggaatcgttctgcgcgatcttgttgagaacctcgaccatgatggtgggatcatcctcgtagatgcggttccaatcgaacagagccttctcttcctcgggcagcacgcggtcgaacacgcccgccttgatgcagtgggcgaaatcgcgccaaagctgcgcgtagttgcaccagaggcccagttcgtcgatggtcgtgccgatgatggtgttccagaggatgcccgactcggtgtcctctttgatgtcggttgcgaggatgccgttcatgtatttgaaggggaagtttgccgcacatgtgttgccggcggtcgccttgccgccgagttcgcccgtgcggtcgatgcgcagatcggagtagcaatgaatcgggcagctgtggcagccgttcatcttgaccgtgtacttttcggcgacctccccgaggtcgtaaaccgatttcatgcagcggtagcccacggtgttgagttcgccgggcttcggctctcccacatcgatggcgccgccttcggcgatgccccatgtaaggcctttgcgggcggaccagcgtgagcccttgtcgtagtattccgcccattcctgctgggtctggggtacgacgtggttgttgttcgatccgatgatttcgcgcagcatgtaatcggaaagatcggcaaccgcctgcgggtcggcaacgttcaccgagccatctccttcgacgacgagcgctttgcacatcttcgaccccatcaccgcgccgacgcccgctccaccagagtgattgcgcgagttgatgatgcaggagtaggggaggaggttctctcctgcgggtccgatggttgccacgcatgccttggtgctctccttgcggcagagcgcctcggtggcttcgcgggttcccatgccccatacgtcgcgtgcatctttgatctctaccttttcattcactatgttgaggtagaccgggtgatccgatgccccctccacgacgatcgcgtcgtatccggcgagcttgatctttgcgccgatcatgccgccgcagtgcgcgtcgacgatcaggtggtctttggtgaacgtggagagcgagcagatagtcgtgcgacccgccagcggcacgcctgatgccgttaggggtcccacggcgaatacgatcttgttttccggggacaagggatcggtgcccgcgggcacttcgtcgtacatgatcttgttggcgaggcccatacccccgatatagagcttatacggatcggtcggctcggtggtgatggatcccgtgctcaggttcacgcgcaggatcttcccggcccatccatacgatttctggtcagccatgttgatatctccaaatctcttgagtccttggttgtgtgaggagcaaacgagatattgggcagcatggacgaaaaatcgtcgcttgcgagtatgcgaccggggatgcccggcacatcccctctttgagggtaattcctctgatctgcgactttactcctaaagagggtaatgccgttttgcacgggcaggcacaatctgcagtgttgtgtgagaaggcggacgggttttaagggaggaaaaggacccgcggacgcgggttgaaccaacgaaaacgacactcacagacgagtacgtgagggggagtaagagactatgtcagatagcaatctgcacgatcaggtttcaccgcagcaggcacctgagcccgagacggttaccgaaaccgaggccgcggagaagcgcgcgcggaaaacggtgacgcgccgtcaggttctcgccatggccggatgcggcgttgcgggcctcgttgtcggaggcgttcttgcaacatggggggtaacctccgagtcgatcgcttcgggccgcatcaccattcgcaccacgcccaccaagatgatcgtgaccgatcgcgcccgctgctcgggctgccagcgctgcgagatgatgtgcacgcttaaaaacgacggtcgcgtgtgccagagcatcgcgcgcgttcgcgtgtggccgaactataactacggtcacggcgtcgacaccaaagacggcgttttcgacaactgccagttcaccatcgagagctgcaagcaatgcgaagatccccagtgcatgaactactgcccggtccacgcgatctactgcgatgaggaatcgggcgcgcgcgtggtcgacgcggacgtatgcatcggctgcggcatgtgccacgcggcctgtccgtggaacatgccggtcgtcgattccgaaacgggcgtttcgacgaagtgcatttcgtgcggccgctgcgcagagcagtgccccaacggagccatcaagttcatcgactggaaagatatcgccgaccaagtcatcgcgcagggcgtggtgtccacggcgaccatcgtataggcgtgcgcgaagcgtcgacgcggtgtcgaagcagcagcgggatgcgcttgcatgcaacatgggaatgctgcaggtcaaggcgagcaaatccgcactgctttgcatcaaaggcgcatcggtacgggtaagcgctacattacgttgatacagcgatacactgcagggtttggaaggagaaaagggcgatgattgaggacgaggccatcttttcgatcatgtcgaaatgcttcgctccaatcgatgagcgcgagtggcaagcgctcgcgaaaggcgcgacctggtcgggctttctcgatggagtgcgccgcgccatgcaggacgagaagacgttcggttgttcgaccggcgcgtttcagcgcgcagcccggcgctgcccgctgcaggattttctctctgccggcgaggtgagggccctgttcgctcctccgagtttcgatgagaagcggcagtttgcagcacgccatttcgcaggcgggttgcccgaatctgccgttccggtcgaatcgctttacgttcgatggtctcaaagcgtttcgaaccaggctcccttttcgcatgcgaaaggtttgtaccgcggcgattcggctctttacatgagcgagttgatcgagcggctcggcctgacgctgcccgagccattcgcttcgtgccccgatcatcttgccatcgagctcgatctcgtggcggtgcttttgcgatcgggcatgcgcgaagaggcgcgctgctatttggccgagcgtttcgaatggctgacggcttaccggatgcgcctcttggccctgggggaagaggcgagcttttacgtcggcttggtggatgtcattttgggcattcgcgcccagcagggcgttcggcaggcgagcgcatagcgaaagcgatgggaggccgttcgggagacgggcggcgcggaagagagcctacgaaaacacgcgaccaaacgcgtgcagtgtatagaagggaaacagttatgtcagaaaacgcagtaaccaggcgaagcttcctggccggcagcgcgggcgcggcggcgctcgtcgcgggtgccgggtacctgagcttcgatgcctgggagcaggcgcatgctgacgagcaggatgcgcaaggtcaaacgacgaccgcgcattcgctctgcaacgcctgttccacaaaatgcgggttcacggcttatgtatcggacgggcggttgtcgaagttgatcggcgaccgggatcatccttatgcgcagggcaagctgtgcgctcgcgggtacggatattcccaaatcgcctattccgaagaccgcctgaccgacccgctcaagaaaatggaagacggaaaattcgaagccatctcgtgggagcaagcgtacagcgagatcgccgacaagctcatgtcgcttatcgatgcgaacggccccgaggtcgttgcgctcgtgcaggatccgaggccgtcgggcaagtactacacgaagcgcttcatggatgcgattgggagcccgaatttctacacgcacggcgccgcgtgcaatctgtcgaaggaaagcgggttcacgcaggttatcggcaagggcaactacgaatcggatatagagaacgccaagatggtcatgttcatcgggcgcagctacgccgacgcgatccgcccgagctcggtgatcgcgctgcagaaagcgcatgaaaacggcgccaaggtggtcatcgtcgatccccggtgcaacaacacgcgcatattcgccgacgaatgggtgcctatcaatccgggcaccgaccttgcgctcgtgcttgcgatgtctcaggtactcgtaagggaaggccgctacgacaaggagtacgtggccgagaacgtgagcggcttcgacgagtgggccgcccaggttgtcgaatacactcccgaatgggctgaaaagcagacgggaatacccgccaatactatcacgaggctcgccctcgagttcgccgatgccgcaccggctgcctcgatcgagccgagctggcgcggggctttcggctgcgcataccagaactccggcgagacggcgcgcgccatctgcgtgttcaacacgcttttgggctgctggaatcagaagggcggcgctctgttcacgccgagcgtttcggcgggaaaggtcgacgaggaaaagttcccgcccgttcccaaacccgagggtaagcagctcggcgccgcggaatatccgctcgcccttgcaggcatgggatcgaacgtctacgctgcccaacaggcgaaagagggcgcgatcaaggccatgatcttctacaactcgaacatggccgccgggtattccaacacgcgctatcttgccgaagcgctcgaaaacctcgagctttgcgtggcgattgacgtgcagatgtccgagacggcgatgctcgccgattacgtgctgccggagtgcagctacctcgagcgcatggagcttcccgagttcatcggcggcatcgtgcccgccgttgccctgcgcgatcaggtgatcgagaaggtgcatcccaacacgaaatcggtcgatgagatattctgcgagctcgcagaagcatgcggcgtgggccagtacttcggcttcacggttgaggagttggccgatgcgcagctccaaagcgtgggcctttcgctcgatgcgctcaagacgacgggcgtcgcgtatttctccgataaggagttttcctacggcaagacgcccgaatggaagaccccgaccggaaagatccagttcacaagcgaagccgtcgaggcggcgggcctgcctgctgcgccgatgtggatggagccggccgttatgccgattggattgcagctgcgccttgtgggcggcaagcaagccattcacagccacacccagacggcgaacatcgaagacctcatgcagatcaccaaggattacgatcttacccgcgtgtggataaacaccgacgttgccgagcagctgggcatcgcggatggcgatgaggtagaggtttccaacgaggagcatacggggcgatgccgtgcgaaggtgacccagcgcatcaacccgacggcgctctacatgccgagccactacggttgctcgtcgcccgatcagcacaccgcttacgaagtcgggcttcgccagatggatttcgttccgtttaggatcgaacccggatacggggcggcgtgcacgcaagaggcgctcgtctcggtgaagaaagtaggtgcatgatggcccgctacggaatgctgatcaataccaagaagtgcatcgggtgctatgcatgccgagttgcgtgccagcggcagaacaagctgggtcccgacgagccgttcatccgctacgaagaacatgaaacgggggtctatcccgaggtgggcatcgagacggtgccgctgcagtgcatgcactgcgaagacgccccgtgcgtatcggtctgcccgacaggcgccgcctacaagggccccgacggcatcgtaggcgtcgatcatggacgctgcatcgggtgcaagtactgcatggcggcatgcccctaccaggtgcgtgtgcacagtcacgagacagggacggttgacaagtgccgcttctgcgtcgtgagctcggctgaatcgggaacaaagatgtcgacctgcgtcgatgcgtgtctcaccgatgcgcgcatgttcggcgatctcgatgatcccgaaagcgatatatccaaggcaatcgtgaaggagaacgcccagccgattgcgggcgacctcacgaaggccaagatcttctatgtgaggtgatgagcgatgtctttcgaacctgtatggggtgccatcatcgcgtggtatctgttcttggcgggtctcggcggcggcgctttcgccacctcggccttcttggggtggaagcaccccgaagcggtgaacatgcgcaagatcgcgcatatcatagcgcccgtcgtcgtgatcatcggcttgctgcttttgatggtggatgccgagggcggcctgcataacccgctgcgctttgccttgctgctcacgaacttcggatcggtcatgacatggggcgtggtgttcctcgccggattcgtcgtgatctcgcttgtggcggttgtgctcgacttcctcaagcgctcgatcccggtgtggctcgacatcgtgggtacggtgttcgcggtgtgcgtggccatctacaccggtgtgcttctgggcgtatgcaagacgttcccgctgtggaacaacgcgcttctgcccatcctgtttctcgtgtcggcgatgtcggcgggtgcggcggccgtgctgctcgtgtcggtgtttcgccatgccgacgagttcaacatggtgggcgtgctcaagaaatttcacttctgcttcccgatcatcgagctcgtgctgctcgcgtcgctcatgttcatcacgtcgttcaattcggaagcgggctggaattcggtcatgagcctgctcatcggcgaacatgcgctgctgttctggatcgggcttgtggcagtgggccttgtgattccgactgccctcgagacgtggttgctgttcttcagcccgcgtgaattcgaggagagccgtaaagcgcactacctgtccgccgcgtccgatgtgggcgtgctcgtgggtggtttcctattgcgctatctgatcgtgatcgccgcgttgccggtgacgattgtggtgccgatgctgtaggcgttggcaagcttcgggctgcccggttcgtccgggcagcccgggtgcgttcggccgggttgggcacgttcggacacggctggctgagttgggcgcatccgggcagtccgggtggcctcgggcagggccaggcgccctcggcgctcccacgcactcccgtgccctacgggtttggcgccccggacgacccggctgtctggacctgtcggtttgaccccgtttgccgcgtttccgaggccatgctggcacaaaaatgagttttggcatggtttttgttgtttggaaaataattgacctgcggttatggtatgggtaagtaccgaggatcatcgaggtttttgattgcccatagggtgaagcccaatctgcctcaaaacgccattctcgatacgatgaacggcttttgcgtgtgttcccccgaattcacttttgttcaggcggctgcgatctgcgagctgccgaagctcatcgagatcggctacgagctgtgcgggacgtacgacttgtcagaaggaaggtatcgcgaatgcgcaccgctcacaaccgtcgaaaggctgacggcgttcgcaggtgcggcggatggggtgcacggggtgaggaaggcgcgccgcgctttgaggtatgtcgcggaacgatcggcatcgccgcgggaaaccgttctgaccatgctgctctgcctgccgtatggattcggtggctatgggatcgagatgccgcttttgaaccatcgggtcgatgtcgtcggcgatgccctcaaaatgacttccaagaagtactgcgtttgcgatcttttctggcccaaggcgaatctcgttatcgagtacggggggaggagtcgcacaccgggatcgagcgcgtatcgaaagattcgatgcgccgcgacgcggtggcggcgatggggtacacggtgataactgtaacgaaatggcagatcaacagtggaaaagacatcaacgggatagcgcatgtggtggcagggcgcttaggcaagcgattgcgctataaagatccggagttcacgcacaagtgccttgagctgcgccggttgctgctcggcagggaatagctcagtccaccttcttccgtgcggctttcttttcgctcgtcatacgcttgtcttgcagccggcgctctttggcgcggcgggggatgcgcgtcttcttgcggattttcggcggttgggctttgcgctcgaagatcatccgcagcttctgaaggcaaagctggcggttccgaaactggctgcgcgattcgcgcgcggtaaccgtgatgcccgtgggcaggtgcttcatgcgcacggcggaatcggtggtgttcaccccttggccgccgggccctgtggcgcgaaaaaccgacacctcgcaatcacgggcgacgtcatcgagcgattgcgaggcgaagcgggcgaaatcgcgatatgtcgggctctcgttgtccattcccctatggtagcaggttatggggcgccatcgccaagctgctacggttacggctctacgacattgaagaagaaatcgtaggttaccagatgctcggtgagcttttcgattacggtgggatcgccttttatctggacgctctttgcgatcgagtcttcgtcgttcgtcaggatggcgaacattccgaggcgcggcaaggtgagcgtcgcgtcggcatcgtcggactgtacgccgcgctgatacaggacaactccaaagcgcatggtgagcagataggggtcgtcatcggtgaaggcaaggttcacggtgagatccgtgcttgcagcggcgttggcgtcgataagaatgcccagatagtcgagcatcatggccacgggcattgcgcgctgaacgtcggccgagccttttgcgcgataggcgtcgtcttgcgtggtgccttcgcgaagctccttggcgcccgagagatacacgtttctccaggtgcccgattccgctcggtaggcaagctgttcgagcgcgtcggcgcacagcaggcgagcgcttgtgttggatggatcggcgaatacgagcgtgttggtaatttgagcaacccattggtattcgcctgcatcgaaatccttttgggcgcgtgcgagaacggcatccgtgtcgccgaggtactccaccagcttcttggctgcgtcttcgggtgcgagcgggtggaggttcacggggttcgcgtcgtagaagcccatgtatttctgatagacggcgcgtgcgttgtgcgcaaccgtgccatagtactgtcgcgtgtaccatgtacgcgcaagcgcatcgggcagctcgatcatgttcgctatttcggtggaagtgtagccctggttcagatacatgagcgtctggtcggcgatgaacttatagacggcggcggtgttttcgaggtactcgttcacgacgccgttgccgaaatggggccagttgtgcgattggaaggtgagttcggcttgcgatccgtaccgggccttcgtttccatgaggtagttcgcccaggcgtttccgtcgcgaacctcggcgccgcgcagcgtgtacaggttgtgcaaagtgcccgtgcagttttcggcaacccacagcgcgcggcggccgggaaaccacgtgttcatttcggcaggggcctcggtgccgggcgtcatctggaattccatttcgatgccgtcgatcgtgcgcgtctcgcccgtgtaggtaatcgtatcgttcggcgacaggtaggagacggtgcccgttgactgcccgagcccgatgccgatggaaagcgccccccgttccccgcggtcaaggaacgctccgtactgatagcctgcgcggcgccccatcgcgtttcccgcgtacacgttttctgcaaccgcatgttcttcgaatccggatggcacgatgatgggaatcgcacgttcggccacttcttcttcggtgacgatgcccttgataccgccgtagtggtcgacatgcgggtggctcatcacaatgcccatgatcgggcgctcgcccaggttttcggtaacaagcgcgaaggcggctttggagcactcgacgctcatgagcggatcgaacacgatccagccggtttcgccggcgatgaacgtgatgttcgtcatgtcgtagccgcgtacctggtagattccgtccatcacttcgaagaggccgtacaggtggttgagctgggcgttgcgccaaagactcgggtttgccgtatcgggcgcgcctgcgggggatccgtcctcggcatcgaggaaggcgtacgccttttggctccaaacaactttgccgttctcatcgacgatttccagttcgtcgggggcggcgatgaggccctgggtggcgaaatcgcgttcgcgctcgtcagagaaatcgagcagcgcgtaaacggcggcgttggcttcggccgtggtgtcggtggcgcctttggcatcggctgtgagctcaagcggggaagcttgcgtcggttttccatccgcgtttttgctttcgccgtccgcgcagccgcataaagcggcgcccgaggcgacaagggccccggttgcgaaggctccggttacgaatgtgcgtcgatcgatggctgtacgggtcatagctgctcgctttcgttcggtgcggttgcgcagatgccgcttggcggttttcctgcccaacgcttgccggccctgtccttgtgcttggagtatcgcacggctgcaaggcccgagatcgtgaggcccaaggcagtgacaccaaggaagaaggcgagcggcggcgttcgtgtaggcggcaaggcgggctaggggttgcttctttatacgaacattcctttgggaggtcctggctgaacgcggtcctcagctcgaggcggcggcgcttgccgatgcgctcggcgtgcacagcgccatggatgcggtgcttaaggctcgcgatttggggctgatcgagtaggggtgcgctcgggcgtttccgcatattctgcgagccgttcgctgcgcatgcggctcaactatttgctgcaattgtgagaatcggcgcagagtcctttctttctaaacgataataggtatcattaagaaatacgcaacagataacctgagtgcagccgatgcaaggtagctgcacgccaacgaaaggaagggatcgatgatggacgagaaagtctacgagcttttgaacgaccagatcaacaaggagctgtattcggcgtacctctacatgtctttcgcggattactacgaggacgaggggctgtccgggtttgccaactggtacatgatccaggctgccgaagagcgcgaccatgcgctgatctttcgcaactacctgctcgacaacagctgcaaagtccagctcaaggccatcgatcagcccgacaagaccttttccgcctacatcgagccgctcgaggctgcgctcgagcacgagaagtacgtcacttcgctcatcaacggcatctacgaagccgctcatgatgtaaaagactatcgcaccatgaaattcctcgattggttcatcgacgagcagcttgaggaagaggcgaccgccgacgacatgatcacgcgcatgaagctgttcggccaggatgcgaaggcgctctacgagctcgatcaggaatacgctgctcgcacctacaccactccgagcccgcttgcgaacgaggaatagcttcaaagcaattcgacatcgcacttcgagggcgggagacgcagtctgcgtctcccgtttttctagctacttcacagctttgctctgtttgcgccgatgcttgcgcatattgctgaacatgcgggcgtaccacgcgctgacgacaccggaatcctcctcagccattcctgaatggatatcgcgcgtgagggcatcgagcttttcgaacatctgcttggcgaggtgctttccttgcggcgtgcatgagagtacgaccttgcgtccgtcgccttcctcctcctgctcgcttaccagcgtgctctcaagaagatggctcttgcagagcgaaagggcgctgcgagggaggaggagcgcatcagcgatctcgctggatatcagcttctcgcattcagacagataatagagcacgcaaaagtcattcagcgaaagatcgctttcgtcgcgaagggttcgggtccagcgatcgacgatgatgcgccagaagatgaagtggtcgactgagatgggcagatcggtgtgcgggaggtctccgaatggttcgaccgcgaatcccctgatgtggttcacatcgtggcgcattccctttttgagcacgtcttcgaagtcgctttcggggagtgcttcccaaagggattctttcatcagcaggtaaatatcgcggttcgcgcgctcggctacggtgcggccatgttcggtgagctggacgagcatgaatcgcctgtcttccggatcattcagcttggatacgaaacctttgtcttcaagatcgagcagcattgatcgtacggttcggggtgagagcataagcagttcggcaagcggttcgagagcgagcggctgcactgcttcatgcatggcgcaaagaagcgtaagctcgctgtagaccagttggccttcggcccgcagatagccggtgaatagacgatcttgctcggcaaaaaacgtgcaaagccgaacgctgaatcctatggaatctcctattctcatgacccctcccgtccttgcattatgccatacatgtgtgccgagactacggactgccatgcagttcgtagtctcggcgaaagaggcttcaaccgattgggctagacagcctttatatactctgcggcgctatttgctgctttgcggcctgaattcacattgttgcccatctgcgtgccgggcatattctgcgtgtagacgttgcgccagagcattgcgccgtcgagtccgacggcgtacagcccagggatcggcatctggctgctatccagaacttcggcgtgcttgttggtcatgattcctccgtcgacgacgacgagcaacgggacgactttcgccatgtaaaacgggccggttgtaagcggcagcatgaattccgggcttttgccgaaatcgagatcggaaccgatttcgcaaagcttgttgtaacgtacgaccgttgcttcgagttcgtcggcatcaaggtcgaagtgctctgcaagttcgctgattgaatcagcttggaagatgctgtcgtcgttatcccctgaaagcgccgccgcggctatctcggcatcggcaggatctgcggtacaggaatcgagaagcgactgatcgaagatggcatacgtttcgcgattgcccttacatgctgtggcttgggctgccatgtttatgtagccaaggtcttcgggcgtgaaccggtcgcctgcttgattgacccacaggcacgggcccatcgatgtcaatccgaaaccgccgttcagggggctgttatacggggcagaggtgtcggttccgaaagctttgatggcgttgaacacttgatcggcagaattactcaggtagtctttggcacccgccgacatggccatacggtagccgtcgccttcgaccgatggcacacattggaagagcatctcatctacctgctcttgagaccagccctgctgcatcaaaagctctcgattgccgccaattccgcccgaagccaatatgatcgcctttgcgtttatttggatagactcctttgcggtgttttcagcgtagaggcccgttgcgatgccgtccgctatgatgagctgcttggcggtcgtgcctgttcggatttcgacacctgccgctttagcggcttcttgcatgggcggaacgtatccgacggcagcgcattcgccttcgaaccagtgcgcggtttcaaaaagcccaccgggggaataattgtcaacggtgccgttgaattccacgccgcattcttccagccaatcgaagttggcggccgaactggttaccatatcgatccaaagcgacccgtcgacgcgatattgcgattgttcaagttctttagcgacgatgtcgacggggtcgatttcaatccccttttcccgctgaagccgcgtgtctatggcaaatatgcattcggtgcccatgccgttgccgccgatttcccccgatttctccaaaaggatcacgctgtttccgttttgccccgcttgcacggcggcggctaagcctgaaatgccggcgccgacaatgacgatgtcggtatcgatcgtctcgacgatgttgtctggagctgtcgatgtcgctgcttccgcttcttcttgcttggcgtcgcctgtgtcagaatcgggcttcccggttgagcagcctgcaagccccccgaccagcagggcgcctcccacggccaatccggatagaaatccacggcgcgagaggccttctcgcatggcttcggtgtgttcaaaatcattcataattccctcctgtattcctcggtacgctgcgggcttatctgagagtccctgagcatttctaacgatacggaggattcgcggtttattccattgtcggatatcggactatcggctttaaaaacacctgttcaaagtaccgaagaagaaatcagaactcacagatggttcagatgcgggtcgtatttgccgcgcatgctgagtccgtgctgcacactgccgcgcgctttgcactttgaacttgcttaagaagagcaggtaggtgggtataaaagcccgatcgctaacgccgcgatcgggctttgggccaaggcttgatgtggtggatccagtaaacctattcgcttctcagcgcttccacggggtctttcctgctcgctgcgcgcgaggggatgaggcccgccaaaaacgtgagcagcatgctgatggctacgaggatgagcgcggcctcccagggaagcgatgccacatccttcacatcgaagagcgagtagacgatggcgttcgcggggatgcaggcgagtgcggtcacgccgatgccgatggctcccgccacgaagccgacgataagcgtctcggcgttgaacacgcggctgatatcgcctttgcttgcgccgatggagcgcaggatgccgatctccttcttgcgttcgagcaccgagatataggtgatgacgccgatcatgatcgaggagaccaccagcgagatggccacgaaagcaacgagcacgtagctgatcatgttgatgatatcggttaccgagctcatgagcgcgcccacgaaatcggtgtacgtgatcaccttgtcctcttcgccgtcggctttcattttgtcgttgtagccgtcgaggatgtcgatgatcttcgctttgctctcgaagtcgatggggtagatgtcgatgccggagggcttgtcgaagcttgcatatccgagcttcttcaggttgttgtcgtaagaatgctcttcgactctcatgagcgacatcatgagctcggtgagctcggtttcatccatgttcatctggaaggcgttcttgaacgcttcctcgtcgatgtgcatggcgttggccatgttggaagccatctggttcatcgattgctgcaatgccgatgtcacctgcgattgcagcgactgcgccatgaggttcatgtaggtggtcatggtcgtctgcacgtagttttggagcgctcctgcaacctgggcttcaagctgatcggtgtcgaccatgccctggagtcccgctgcgatctgcgcctgcacttcagggcttgcaagatactgttcggcggtcatcgggttgtagtcgggattggggatgcgcgggcccgacggatcgtcgggattgactattgtcggcggcacctgcgtggcatactgctgcaggtacgttgcatagccctgcatgatctgcgccatcatgctcgccacttgatcggtggggatatcgatatccagggcatcgacgatggaacccatatcgggttggggtgcatcgggcagattcgccgcagcgctttgcaggtcgagcgaattggacatgtccacggcaagggcgctctcgtcgatgacgaacgccgattgcagcgcgtcgccgtcgatggtgaacagcgagttcatatcgaagctgttgtccgcttcctcgtcttcttcggtaaacgatttgcccgagaacacgtcgatcgtcggatcggcaagctgatccttcacgatctgcgtgtcggcggactgctcgatcacgtggtcggtgagatccgacgtgtagtagatgccggttgaaagcgcggtgatggtggcatcgggcttcggcatgacgataccgctgattttgaggttttccccggcgttgacgatgtccttcatgtaggcggcatcatcggtcttgtctttccagacgccgtattcttcgtcgtattggtagtattcggttgagctgaccagcttgaacgatacatcgagaatgtcgtcgtaggaaaccgccatgcgatcttcgggaacctcgacgtcctcctctgcggcgaactgcttcaccatctcgttgagctcgtcgggatcgcgcagcccgagcgtgtacagcaagaagtcgcttacattgccgttgccggtgagcacgacgaccagctcgtcatagcttgtcggccacgagcccgctaccacgtcgtactgctcctcgatgagacggcggtcgtcggccatctcgtagaacgtatcggtgctcatcgacatcgacatgaggctgttggagctggtgtccgatccgaggccgagcgccgagaacgatttgtcggggttcacctggcgcacgccgtcttcggtgtcggcgctgaagatctggggcgtgacgtcgtaggagtactggatggaattcacgtattggtcgatgtcgctctgcccgctatcgaggtattccttgagggaggcgagatcgttgctgccaatgctcgagaacatgcgcgtgatcatcttggtctcgcgcacctggccttctgccgtatcggcatcatcgtcttgggtggcgcctgcggccgagcccatcatcatggaggtcagatcgagcccggtgctttggatttgcagcgggtactgcgaaagcgtgtcctcttcgacgctcttgatgtagttgttcacgccgttggcgagcgcgaggatggctgcgatgccgatgatgccgatagaccccgcgaacgccgtcatgagcgtgcggccttttttggtcatgaggttgttgaacgaaagggagagtgcggtgaagaacgacatcgaggtcttgcgcggcgccttctcgctttggtgctctgcaatctcctcttcggtgggatcgtacgggttgctgtcggaagtgatcacgccgtcggcgaggttcacgatgcgcgttgcgtactcttcggcaagctcggggttgtgcgtgaccatgatgaccaaacggtcgttggcgatctcggtcagaagcgccatgatctgcacgctcgttttcgagtcgagggcgcccgtcggctcgtcggcaagcaggatctcgggatcgttgatgagcgcacgcgcgatggcgacgcgctgcatctggccgcccgagagctggctcggtttcttgtccatgtgatcgccgagaccgaccttcttcagcgcttcggctgcgcgctcgcgtcgttcggcacgggaaacgcccgaaagcgtgagggcgagctcgacgttggccagcacggtttggtgggggatgaggttgtagctttggaacacgaatccgatgcggttgttgcggtaggtgtcccagtcgcggtctttgtactgctcggtcgagatgccatcgatgacgaggttgcccgaatcgtagtggtcgaggcctccgacgatgttgagcatggtggttttgcccgagcccgacggcccgaggacggcgacgaattcgttgtcgcggaaggatatcgaaatgtcgtcgagggcgacctgcgagaagctggccgtggtatacgacttgcggatatcgatgagttggagcatgatgcgcctttccggctcgggatgcttgcatatggtcaaccggctcgagccggatctgttgttcgggaatccgcattgtttcgttgcggctgcggcaccaaaggatcggcaccgggctcgcgttacaaattcctcaaaggctggagttcatcctaaaccgaacagtttagtggctaaactacttttggccgtgtgtggcaaaactacacagatttgtcgctcgtttgttaccaaagtgcaacttcggatgatcgaacgtgcggcaggagggtgtcggcggctatgcgtcaacggtttggcgagtcgaggtaacaaaatgggcgttctccctttaggttcccgaggaaacgggatataatcggcctgcccgacagtgtttcaaataacgcagttttataaacaaagactatcttcgccaagttagtgtctgagctttataacctgcaaacgcccgtcgcttcggcgggggctggtaggcagtagagcgcgatgaaagcgtactgtcggtattcctttcggcaaggccgggcttcgtgcccggccttgttgtgcaagacgatgtggtagacgattgctgcgggggtagcacggtaatggatcgtagtggggaaaacggcgcgctgccgccggaaggcgcgggtgcaggggatgcttcgggcggtgcgggcgtcgagccgccttttgcagctgcccccgaatctcttcgaaacgcgttcggcttgcgccgttgcgcaggcgtcgagcgggtgccgctgtaccgttcgcgcgagctgactgaagcgacggcggacgacatcctcctcatgcgaagccttggtatcgcgacggttttcgacctgcgcaagcaggcggagcgcgatttatctcccgaaccggctatcgtgtgcgaagcgttcgacgtgcgcatctgcaccgtcgacttgcaggatgacgagaatcgcacgcgcgcgacgatggcgcccaacgtgaaggccgcgtacggcaagccgggacagcgcatgatcgatctgtacggcatcatggcgacccatgccggcgaagtgcgcgaaatcgttcggcagatcctttcggcagacgagccctgcctggtccactgcgcgaacggcaaggaccgcgccggcatcgtgtgcgcctgcgtccagcgcttctacggcatctcccgcgaaacgatcgtcgaagactaccttgctaccaatgtatgcaacgaggcgatcaaccgacgcgatttgaggcggtatgcgggcatcatgcagcccgaggaagtcgaagtgctcgcggccatgttcgaggcccgcatcgaatatctcgatgcgttcttctctgcgatcgacgagcgctacggttcgttcggggcatggatgggcatgtaggagcttggctttcgccgctgagcccgtgccgaacccctgaaagcaggtaacacgagggtaaacgcttgcgcgatcgcgttttggaaggcgtacactggcgtgcatacggaaatgcgaaggaggtgcggcgttgcaggatgcgcttgtgtgggctgcggctggaacgggctttacgtttctcatgacgacgataggcgccgctgccgtgtttttgttccgcaagaaggacagcgctctcatgcagcggctgtttctcggattcgcagccggtgtcatgattgcggcatcggtgtggtctctgctcattcccgccatcgagtccgccgaagaggcgggtcggatcggatggataccggcggcgggcggatttgctctcggcgtggcttttctcatggggctccatgcgcttcttccccatattcatcctggcgagaagaagcccgagggtctgccttcgaagtggaaccggcccacgctgctgttcacggcggtgacgctgcataatattcccgaaggcatgagcgtcgggctcctattcgcaatggcggctcagtcgggcggcgatcccgcgatgttcggcatggcggcagcccttgcgctcggcatcggcatccaaaacgttcccgaaggcgcggccgtttcgcttccgttgcagcaggagggcatgagcgcgccgaaggcgtttgccatggggagcttgtcgggactggctgagcccgtgttcggcatcctcgtcgtgctgttcgcggcggcgatttcgccgtacatgccgtggatgctcgccttttccgcaggcgccatgatgtacgttgtcgtggaggagcttattccggaagcgcatctcggcgatcgttctaatgtgggtacgctgggcgttatgctcggttttctcgtaatgatgatccttgatgttgcattagggtagaatgcctgaaacgtttgtattggaaggaaacccatggaagatttcgaattcgtatcgccgacccatttcgtattcggacgcgatgccgagctcaaggcggggcgtatgctcgccgagcgcggtgcccgcaaggtgctgctgcactacgggggccgcagtgccgttgaaagcgggctcgtcgaccgcgtgaagtcttcgcttgccgatgccggcgtcgagtgcgtcgaattggggggcgtgcggcccaatcccgagataacgcttgtgcgcgagggcgtggcgcttagcaaggagcacggcatcgattgggtgctcgccgtgggcgggggatcggtaatcgattcggccaaggccattgccgtgggcgcgcattacgagggtgacgtgtgggatttcttcgagacgaagcagcagaccgatgacgtgctgcccatcgccgtggtgctcaccattccggctgcaggaagcgaggcgtcgaagaacacggtggtttccaacgacgaactcgggctcaaatcgggctatccgaacaacgcgcagcgtccgaagatcgcctttatgaaccccgagctcaccttcacccttcctccgtatcagaccgccgcgggcctcaccgatatgttctgccatctgctcgagaggttcttcgacgacgttggttccgttcccgtgacggacaacctgaacctttcgcttatgaagacggttcgcgcagaggctcctcgcgtgctcgtcgatccggaaaactacgatgcccgcgcgaacgtcatgtgggcgggcatgctttgccatcaggggcttgctggtgtcggtcgttacgaggattgggcgacgcacgggctcgagcacgagctttcggcgctcgaccccgacatcacgcacggggcgggcctcgcggtcatgttccccgcatggatggaatacgtgtacagcgagaaccccgcccgcttcgcctattacggacgcgaagtcttcggccttgcgccgacgggggacgtcgaagacgacgccctctcggccatcgacgagacacgcggtttcttcgcttcgctcggcatgccgaccacgcttgccgagctcggtatcgaagaagccgatatagagcgcatgattcccaccctcaaggcaaacaaaggcgagccgttcggaagcttcatgaagcttagcatggacgatgctcgcgaaatttatcggctggcgttgtaggaggcaggtatggagcagcccgaaaccgttgaatcgtatttgaggaccctcgaattcaagaagaagagcttcggcggatgcgacgaagaagatgccctcgcgaaggttcatgaggttgcggcgctctaccaagccgagcttgatcggctcgaccggcgtgcgaaagcggccgagcagcgcgccgccgattacgagcgccgccagaccgaggttcggcagctcatgacggctgctcaaaacatgaaagatgccatgctcgaaaaggccggggaagattcgcggctggctgtttccaaagcagagagcgaagcgcagaagatgattgatcgcgccgcttcggatgccgaggacattcttgccaaggcaacggccgatgccatcgtgatcgtatccgaggcgcgggatcaggctgagggcatgcgcattcgggccgagcaggaggccgaggcgtcgcggcgggagctgcaggagacgacggcggcgttgcttgaggcccagatgcaggtgaaggcagatgtcaagcgccacaccgatacggcgtacgcgaaggccaaggttgcaaacgacaacctgggaaagatcgtcgaagcgctcgctgaattgcgcgacagcatctcgtcgtagcgatgggagccgttggccgcgcgcggcttttgcggttgcgtgcgacgcgattttcgcgacatgcggataggcggtgcgcggttgcgcggcttttgcggtggtgcgccgctcggccgcataggcgggctcggagtggcctgttcggtgcgattgcgtcggcgggtgcggctgttggcctgcgctgcgcggtttcgcggtgtcgctgcatgcgtcgcccgctcgaagcgcctcgcggagcaagggaagctcttccttagctaaaacgccgctctgaatggcggtcaaggcaagcttctgtcgagaatacgcgccgtttcgggcgtttcggggagcgctttcgcgattcgggttttcgcgacctgcgcaaacgtcggcaagagagcgatccggacgcggcgaggccgacagaagcttgccttgaccgccattttcgggcctgttttcgatagggatgatcttatcgaattatgaaagggtgcgatggcggtcgtcggcagcagcagatgccatcgcatctcccctcgtttcgcgctgagggacgtgatgtttcacgtgaaacatctgttcgtatttcgtattggaaacaggcgacgaagcaactgccgcttcaggggatcggcgagtgcgtgctagtctttgttgctgccgagaatggcgttgacgatccccgagacgatgctgatgacgatgctcgccacgaaagcgcttccgaatgttgcgatctcgatgcccgattggaagatgccgttcgccagccaggcggcgatgtagatcatgagcgtgttgaccacaaggtagaagatgcccagcgtgagcaccgatatgggcaggctcaggatttgcatgagcggcttgatgcttatattgatgagcgagaggatcaacccgaatatggcgatggagacccatgcctcgttgccgccgaccgtatcgatgccgggaacgagccagacggcgacgccgacggcgatggcggtgacaagccagcgaatgatgaacctcatggagtcctcctaacgatgaatgcccaggattatggcatgcagcactcggcagcggtgcgtttggttttctagccgttacttcgcgcgatgacgcgcgcccgctcgccgagccggtccgtttgtgccacaatagccgctatgaatacaaagaagacatcacgcaagcaaaccgggtcggggggcaagaagcgctcccgcgcatcggtgcagcaaaacggcggttctgcgcagtcccaatcgaaaggcgcctcggccaggcctcgcgctgcagctggagcgcggccgcaggcggcaaaggaaacaccggtttgtcccgtcgaagaccgctgcggcgcatgccagctcctgcacgttccttatgagcgacagctggcaaagaagcaggaagccatggccgagctgttcgacggcctcgccggcgaatccaccgtgatgcatcccatcgcgggcatgggagagccgtatcattaccgcaacaaggtcgtttccccctatgcgcctggcaggcgaatcaagccgaaagcggcaaaggcggcgaaaggcgacaagcgcgcctcgacgcgcgaagacaagcacgcgccgacccatgagatactctgcggcatgtacgcggcgggcacgcaccgcatcgtccccaccgatgcctgcctgatcgaaaaccgcatcgcgaagaagatcatccttgccatgcgcgatctcatgccttctttccgcatcgagccgtatcgcgaagatgcgaacacgggatttctacgccacgcgatcgttcgggtgggccacacgagcggcgaggtactcgtgacgctcgtgacgaacggaaggcagttcccgggctccaaagcgctggtgcgcgaactggtcaagcgatgccccgagataacctcgatcgtgcagaacgtgaacacgcggcaaaccaacgtgatcctcggcaccgacgagattcgcctgtacggccccgggttcattctcgacaagctgtgcggcttgagcttccgcatatcatctcaatccttctaccaggtgaacgcatcgcaaaccgaggtgctgtatcgccgcgccatcgagctcgcccgcctgacgggtgacgaaacggtgatcgacgcgtactgcggaacgggtacgatcggccttgtcgccgcttgcggcgcagagcaggggaagggtgccaggcgggtgatcggcgtcgacgaaaccgtttcagccatccgcgatgcgcgcgccaacgcccagcacaacggcatcgagaatgccgagttcgtggcgtgcgatgcggggattttcatgcgggatcttgctgcggaggcaaccgagcggatcgatgtcgttcttatggatccgccgcggtcgggcgcgaccgaagacttcctcaaggcgctcgttgcactgagcccccagcgcgtcgtttacatctcctgcaatcccgaaacgcaagctcgcgatgtcgcctatctcgtcgaacgcggatatgcggtcgaagccgttcagcccgtcgacatgtttccccataccgagcatgtagagaatatcgtggtatgctgcaataatacgtaaaccacttatatttaatgggctttgcgaaaggcgcagcacatggcagaaggcaacaacggggcagccgcccacggcggcgagaaacgctcctcgcaggctgatgacgataaccaggcaatcgaaggattcgtgctcaacgccgtcatggacggcatgaaatccaacgtctacataaccgatccgaaaaacgatcgcatccttttcatgaacagaaccatgaaggaggatttcggcctcgagcaccctgaaggcgaggtgtgctggaagattctgcaaaaaggcctgcgcgagcgctgctctttctgtccggtgaccgagctcatgaagcgcggggctccttccgtcatccagtgggaagaggagagctgcgttaccggccggtcctatcgcaactacgacagcctgatctcgtggctcgatggatcgctcgtccatctgcagcaatcgatcgacatgaccgaatggaaaacggcgaacctcgacgaactgaccgatatgatgacccgccgtgcgggcaaggaggcgctccagtcgtcgctcgagactgcggcgaagggcaaccgggtcatttcagtgtgcttgtatgacatcaaccatctcaaagatgtgaacgatcggttcggacacgccgaaggggatcgtctgatccgcgtgatcacccgagccgtgtcgaaggtgttcaagaggggcgatttcgggttcaggttgagcggcgacgaattcatcgccgtgataaacgccgatgccgttgaagcgaagcggctccttgaatcggtgctcgccgagctgtgcggactctcgcgcacgcaggcgtatccctaccaggtgagcttctgtttcggaatcgtcgaggtcctgcctggatccgatctgactttggcagaggcgatcgcccgcgccgatcagcgcatgtacgatcaaaagcgccggttccatatagaagaaagcgagcgcaaggcgcttgccgagcagccgacgccttcggatgtcgagacgttcgaatacaatgccaaccgcttgctcgacgccctcgtgaagagcactgacgattacatctacgtatgcaatatgaagaccgggatcttctgctaccctaaggcgatggtcgaagagttcgatcttcccggccaggtcatcgagaacgccgccgctatctggggtgcgaaggtccacgaaaacgacaagcgggtcttcctcgaatcgaatcaagagatttccgacgggcggacgacctcgcattgcgtcgaataccgcgcaatcaaccgccgcggcgaatgggtatggctgcgctgccgcggccatcttgtcctcgatgcgcgtggagaacccgagctgttcgccgggatcatcaccaatctggggaagaaggagaagatcgaccatctgaccgggctgctttcgcgctacgagtacgaagaggcggtcaactgccgtatcgacgattatcccgaccgtccgttcggcgtcatggagctgggcattgacgatctgcgccacatcaacgatctgcacgaccgcacgttcggcgacgaggtcatacgcatcacggcgcagaagatccaatcgctgctcccgccgaccgcatcggtataccgcctcgatggcgacgagttcggcgttatcatcgacgaggctgaccatgaggcgctccatcggttctacggtgtgatcgacgagagctgccagagcttgcaggaattcgagggcaagcgcttctactgcgcgctttcggcaggatgcgcctgttacccccgtgatgccgataactacctcgatctcgcgaagtactcgggttattcgctcgagtatgcaaaggcacatggcaaaaggcgctgcgtgtgcttctctccggaaatactcggagagcgtgcgcgcgagctcaagctggtcgagctgctgagggcgagcatcgaaaacgatttcgatggcttcagcctgtgctatcagccccagatcgatacgaattcggggacggtcacgggcgccgaggcgctcgcccgcttccagtgcgaggagttcggagcggtgtcgcccgtcgagttcatcccgctgcttgagaaaaccggcctgatcatccccatggggaaatgggtgctgtggaccgccgcgacccagtgcaagaactggatggcgatcgacggcgatttcgtgatgagcgtcaacctgtcgtatcgccagatcgacagcgattcgctcgtccccttcatcgaggatacgctccaggagacgggtcttccggcgaaaaatctcgtcatcgagatgaccgaaagttattttgcctccgatgaggatcccgtgcgcactgtgttcgaccagatcagaagcttgggcgtgcgcgttgccatggacgatttcgggacgggttactcggcgctcggcatgttgaagaagtctccggccgacatcgtgaagatcgaccgcatgttcgtgaccgatgtccaggcgagcaccttcgatgcgacgttcatcaagttcgtcgtcgagctatgccatgacgttggcatcgaagtatgcctcgaaggcgtcgaaaccgacggcgagtatgcggcggtgagcgccatgggtctcgactacatccagggatttctgttcggacgcccctatccgcccgacgagtttcgccgccgattcttgccgtagagccgtctttcgatagccatcgggccgaaagggctcgcctgatccgatcggcgggcctgcttgtttcatgggttcacagtggtatgcgcatgcgggcgtgcggtacaataagggcttcgatgagacaggagcccgcatggatgaactatcgcacgcaattggcaaaacgcacctgatcaaactcaacaagctctcggatgaagtcggggcatccgtgtacgtgaagtacgaggcggccaatccgggcgcatcggtaaaggatcgcgcggccctttcgatgctcgatcgtgccgaagagcggggagagatagttccgggcaaaacagtgctcgtcgagccgacgagcggcaatacgggcatcgccatcgcaatgcttggagcggcgcgcggatacgaggtcgtcttaaccatgcccgaatcgatgagtcgcgagcgcagggcgcttttggccgcatacggtgcgacgcttgtgctgacgcccgccgctgctggcatggcgggggcggttgcccgtgcagacgagatcgttgcggagaacccgaacgcatgggtggtcgggcagttcacgaatcccgacaacccgcgtgcgcacgaagagcacaccggtcccgaaatcgagcacgacctcggggcggctcccgatttcatcgtggcgggggcgggcacggggggaacgatttcgggtcttgcccattatttcctttcgcgcaacgcgcaaacgcgctgctatgcggtcgaaccagccgaaagcccgctcatatcgcaaagcatgcatggcgatcccatcgagcctgccgcccacggaatacagggcatcggggcgaacttcatccccgcaacgcttgacatcgcggctctcgatggcgccctgggcgtttccaccgaagacgctatcgggcaggcgcgctggcttgccgtcgaagaaggtcttctcgtcggtatttcgtcgggggccaacatcgcaggagtccgcaagcttgcggccgagcaccccgaggcggcgggatcgaccatcgtcacgattgcggtcgatacgggcgaacgctacatctcgacgccgcttttcgacggaatcgggtagcgtcgtcgagtgccgtgcgccgggcgggatcgggcgggagccagtgggaaatcgaaaggaagggcatatgggatacgccgaggatattttcgagcaggcgaagcgaacgatcgccgaacatgagcttgcatcgggtgatacgccggtgctgctcatggtttcaggcggctccgattcgacggcgctcgcctaccttgcccgcgatttgcgcgacgcaggggaggttgggccgatcgccatgctgcacgtgaatcatcagctgcgaggcgatgacgccgacaaggaccaggcgttcgtcgaaaagcttgccgagctgctcgacataccgttgttttcctgcgagatcgatatcgcaggcgaggcgcgcagaaccggcgagaacgtcgaggcggtggcgcgccacgaacgctaccttgcggcgaacgaagcgcttgaaagcctgtgtctgcacggggcagcgcccctatcggatggacgcatattcacggcgcacacgcaggatgatcgcgtggagaacttctacatgcgctcgatcgtgggcacgggtccgggcggctttcgctccatgctgtaccgcaacggccccatcgttcggccgctcatggatgcaagccgtgccgatctgcgcgcctacctggaagagcgggcggaatcgggccttccgacgctgcgtgacgaatcgggcgacctgtggcgcgaggatgcgacgaacgcccataccgaccggttccgtgcgttcgtgcgacacgagatcgtcgcgcgcgccaaaaagcgcaatcctcagcttctcgatacgctttgcaggaccatgaacctgatcgccgatgaagacgatatgctcgatgagcaggcggcgaagatcgtcgagcgccaggtggcgtggttggaaaccgacgaggccctcggcaccgaccattcggcgggctgtgtgctttcgcccgaattcggctgcgagcccgtgcccttgcagcggcgcgcttgcatggaagtgcttcagctcatgctcggcgccgacgcccgtgtggaaaccgcgtcggtcgaaagcgtgctcgccggctttgccgaaggcgcgcccatcgggggttacacgaacaacatccagggcgatcttgccgtgagcgccaacaagcgcggcgtacgcatcgagccgatggccgcctatcgagcccgccgcaagaaagcgtaagggttgcgctacaataaggcctatggataccgaacagaacaaccaacctgccgacgcacctcagtcgagcgccgcttcgtctggggctgaaagccccgaatgcgcggctgcaaccgacggctccgcgccggcctcccagcctttcgaacccgatcgcatcgatgtgatcctcgcttcgggaagcccccggagaaagcagttgctcgaagaggcgggcgttcgcttcaccgtgcatgtctccgaggtcgacgaaatgctcgaacccgacctgcttgccgagccggccgagggggctaagaagctcgccgaacgcaaggcaggcgccgtagtgcaggaagtgctcgcgagcgattaccggggcgctgccgttgtgatcggcgccgatacgatggtggtgcttgacgggacgatcttcggcaagcctcgcagcctttccgatgcaaagggcatgctgcgcaagctttcgggcaacacccacgaagtggtgactgccgtatcggtttggatggtcatggctcccgaacccgaaaaggtttcgctcggcttcagaacgttcagcgattcaagcctcgtcacgttcaaagatttgaccgacgacgagatcgcagcctatctgaagtgcggcgaatccttcgacaaggcgggcgcttacgcggtccaaggcgagggtgcgaagctcgtcgagcgtgtggaaggcgaactcgatacggttatcgggcttccggtcaagcggcttatcagggagtttcccgacttgctcgaaggcgaataagcccagcacagtaaggcaggagcccctaaatgtgaaaatcgtggggctggtgccgtgttaccggattgtgaattaatcccaacatcgtaatgatacacttatcgcttgtgaaggaaggcggaacgaccggtgtcggaactgcggttttcgttcgggtcccggctcgtcgttctgaaggcccgcgaatgcgggctcttgtcatcgaagagggctggcagtgcacgaagacatacaggaagttttgttctcagaagaagagatcgccgcacgggtggctgaaatcggcgcccagatcacgaatgattatgcggatgccgtggcgcaagacggacagggcgttatcctcatttccgtactgcggggcgctgcaatcttcatggccgacctcgctcgccagatcgaactgccgctcgagatggactacatggccgtctcttcgtatggaaacggcgcgaagagctcgggcgtcgtgcgcattctgaaagacctttcgtccgagatcgagggacgccatgtcatcgtggcggaggatatcctggacagcggtctgacgctcaagtacttgatgaagaaccttgcttcgcgcaaacccgcatcgattgaggttgccacgctgcttcgaaagaaaacgctgcagcaagccaagatcgattgcaggtacatcggtttcgaatgccccgaccagttcatagtcggctacgggcttgattttgcggagcgctatcgcaacctgccctacatcggcattttgaaacccgaggtttactaggcatttacatctgcttcggcagagcaaactcggcaaaagaaagacataggctacatggcaaaccaacagcaaagacaaccgcaaccgcctagcacgagaacaaccataatctcggtggttctgttcatggtcgtcgccttcttcgtaggcagccagttcatgaacatgtcgaatacaacgcaaaccgattcgctcatcacgtcggaattcgtccaggcggtagagcaggatcgcgtcaacaaggttatctacaacgccggcgattacacggtaaccggcacgtattatcctgcgatcacttcgggatcgactgcatccgccgcgttcaattcggcgttcgatgcgctcaacgcgaagctcggcatggtgaagaacccgctcgacggcaaacctctgacgggcgtagccaccgaagagctttccatcaaaacgctcggcaccgagcgcaactacacgtcgacctacgtcggccaggattccctgggccagctgctggccgcccacccgaacattcagtacgagatcaggctgccttccggcttgctcgaggttctcggcacgttcttgccgttcatcctgcttgctgcgctcctgtttttcttcttcacccaaatgcagaaggcgaacaactcgcagatgtcgttcggcaaggcgaaaaccaagaagaccgccgaggagcgtcccgacgtcaaattctccgatgtagccggtgtcgatgaggccgtggaggagatgaccgagatcaaggacttcctcgcaaatccggcgaagtaccagtcgatgggcgcgaagatcccccgcggttgcttgctcgtaggccccccgggcaccggtaaaaccctgcttgcccgcgcggttgccggcgaggcgggcgttccgttcttcagcatttccggttccgatttcgtcgagatgttcgtcggcgtcggcgcctcgcgcgtgcgtgacttgttccagcaggcaaaagaggcatcgccttccatcatcttcatcgacgagatcgatgcggtcggccgtcagcgcggtgcgggtctcggcggcggccacgacgagcgcgagcagacgctcaatcagctgctcgtcgagatggacggcttcgactcgaacgattcggtcgtgctcatcgctgcaacgaaccgcgccgacattctcgacccggcgcttctgcgtcccggccgcttcgatcggcagatcgtcgtcgacgcgcccgatgtgaagggtcgcgagaagatcctcaaggttcactctaaagacaagccgatcggcagcgacgttgatctcgccaaggtcgccaagctcacacccggcttcacgggcgccgatcttgccaacctcatgaacgaaagcgcgcttctgaccgcccgtcgcggcaagaagatcattacgcagcaggaggtcagcgaatcgatggagcgcgttatcgccggacctgagcgcaagggtcgcgtcatggacgagaacacaaagcggacgatcgcctaccacgaaagcggacatgcgctgatcgggcacctgcttcccaaggccgatcccgtgcataagatctcgatcatctcgcgcggccgtgctctcggctacaccctgtccatcccgaaagaggacaaggtcctcaacagcttgggcgaaatgcgcgacgagcttgccgtgttcctcggcgggcgcgttgccgaagagctgttctgcgaagacatcaccaccggtgcatccaacgacctcgagcgcgcaacgaagatggcgcgcgccatcgtaacgcagtacggcatgagctccgaccttggcacccaagtgttcggccagccgaaccacgaggtgttcctcggccgcgattacggcaatacgcaggattactccgagcagaccgcgcgccgcatcgacgacgaggttgcccgcataatgaaagaagcgcacgatcgcgcctacgacatcctgtctaagaaccgcgagcagatggacctcatggcgagcgtgctgctcgagcgcgaaaccgtcgagggcgaggcgtgcgaagcgcttcttgacaacacgtggtccgattacctcaatcgcgagaaggacatcatcgcgaagaaggaagccgaagaggccgaagcgcgccgcaaggacgaagaggcgatggcggcggccgaagctgcccgcaaggccgaagagcaggcgcgtcttgccgatccgaactggcgcagcgccgaagttgcccctggcgaccaggatcccaacgaccccggtcggccggcagcaccgggcggtcagggtttcttcagcgagcttgagaaccgctttcaggaaatcctcgacgattcggcgatcgatccgaacgcgaagaagcctgccggcaggccgcaggagcaagcgggagaaaatccagccgagactcagcgggagcaggcggacgacaagctggaaagcccgagcgagaagagcgagaaagatggcgataaataaacgatgatgtggtcgtgctctgatttcgaattcgatacaaggatgcccattttgatgggcatcctcaacgttacgcccgattcgttttccgacgggggagagcatgccgatttcgaggccgccctgtcgcatgcgatgtccatggtcgaagagggtgcccgcattatcgacgtgggcggcgaatcgacgcgtcccggttctgacgaggtccctcttgaagaggagctttcgcgcacggtgcgggtggtaaccgagctcgccgcacgcggaatctgcgtgagcatcgatacgcgtcatgccgaggttgcccgtgcgtgcgtcgaggctggcgcatcgatcatcaacgacgtctcgggctttcgggaccctgcgatgatcgaggttgcgaagcagtgcgccgcgggcgtcgtggtcatgcatatgcaaggcgaaccgaaaaccatgcaggatgcccccgtctacaacgatgtggtcgaagacgtgaggcgctaccttgccgagcgtgcggcagagctcgaggctgcgggaatcgcgcatgagcgcatctgcatcgatccgggtcccggattcggcaagactccgaagcagaccaacgagctgctgctgaacatgcaggagttcgcccgtctcggctacccattgatggtggcggtttcgagaaagagccatatcggcgcgctctacggcatcgacgacccgaaagagcgggacgaggtttcggctcggcaagctcttgcggccgtcgagctgggcgcaagcatcgtgcgtacccataacgttgcgtgcacgcagcaagcgctcaaagatctgaggccctattgtttcctgggactcggatcgaacgttgcgcttgtcggcaaccccggggaagagcgcgaagcgaagatcgccgtattgaacgaagtgatcgggagtttggtggccctgcccgatacccagctcatcgatgtctcgagcttctacgaaagcgaacccgcctatcttgaggaccaggatttgttcgtgaatgcggtcgctcttatccgcacgggcatcggccctcacgacctgctcgcctacctgcatgcgatcgaagacaggttcgggcgcacgcgcaccgtgaaaaacggtccgcgcacctgcgatatcgatatcctcgattatcagtgctacgtgtgcgacgatgagaagctgacgcttccgcacccgctgcttgccgagcgcgatttcgtggtgaagcccctgctcgaactgcgccccggccacgtgcttgccgacggtgctccggttgtcgaggataccgtttcggtggggcgcgccgtcaagctcgaccagcgtttctaaggttaatccatgctcgatgcccaggcgatagcgatggctgcgagaccgactcggattccttacgcatgccgctgcttcgacgagatcgattcgacgaacgaagaggtaaagcgccgcatcgagaagggcgaacccgaaggcacggtggcaactgcgctcgtgcagacgggcgggtacggccgccagggcaggcgctgggcgagccctgcgggaagcctgtatctttcgctgctgcttcgcccgcttgatcacggcgttgccgcgaaggatcttcccacgctgagccttgccgttgcgcttgcggtccatgacgtgctcgcatctttttccgacgatgcgggcgttgtcgtcaaatggcccaacgacgtgctgtgttcacagggaaagctctgcggcatctcgcttgaggccgtgcggcaggctgtgtgcatcggtatcggcatcaacgtgttcgagcctgccgaagtgcccgagctgaccggttcgttcgggcctgcgtatctcgagcgcatcgccgatctcttcgttttgcatcgctttaagggcgaggacgcctgctcggatgccttgccattcggtggcaaacgcgcctgcgcagctgcattcgatgacgcagggcgcttgtccgttggcgcctgcagcgtgctcgaagatgttgccgggcgtttgcttgcttcggtcgatcgcctgtacgcgcagtggttgcacggggggttcgccacacttgtcgacgagtacaacgcccatgcttatctgacgggccgctcggtcggcatcgcctcgatgaacggagacgtcgttgctcgaggcgaggtcgttcgcacgaacgagcggggctgcttggtgctgagggatgccgggggagccgagtgcgcaatagcgtcgggcgaggcgcacgtcgttctgtagcgccgccggtggggcgcgatgtgaacggaggcgttgcccgcatgttcgtccgaggggttcttgcgattcgcttccatatgtccatccgcttcccgaaaccatccgaacatcgatgtgacgagggttgatgcgctgcatttcttccaatccgcacgcagaagagtaaaataatgtttttcggagaagaacgcatgcacagcacggagggtaccgaagcatatgtcagccgcagcagcacagaagccgtcgaccgacgcgcaaacgtcgatgggtcagtccggttccgaatcgggaaagccggtgcgcgatgataaagtggggcgcatgggaacggcctccatcccactgcttatcacagaattcgccgttcccgccatactcggaatgctcgtcaacggagcctacaatgttatcgactcgatcttcctcggacaagccatgggggagatcggcctttcggctgcgacggtagccaaccccatcatgacggtgtttctggccattgcgatgctggtcggaaacggcggtaacgcgcttgcggcattgaggcttggccagggcaggcgcgactccgcagagaggagcttgggaaacacggtttctctcagcatcttcttcgcaatcgtcatcgcgctgtgcgcagcgagccccgtagtcctcgactggctgctcacgctttcgagtgcaaccgacgaggttcgtccttacgcagcttcgttcatccgaatcatctgcttcgggtttatcttccaatgcatcggcatgggcgtgaacaatttcatccgtacggcaggcgcaccgaaccgcgcgctcgtgactatgctgatcggcgccgtgttttgcacggcgttcaattatctgttcgttatccgattcggttggggcgtcgagggaagcgcgcttgccacgatctgcgggcaggccatctcgtgcgccaccgttctctggtacttcattatgacgaaaaacgtgccgctcaagttgaaactgagcgccatggcccccgacctcaaggtcatcggcaccattctttcactcggtttggcgagcttcgtcgtgcaggcaggcatggcgatcgtcagtttcgtgataaatctgctgttggtgaaatacggagccatgaaccccatcggagccgatgacgccctcgcctcgatcggcgtagtgcagcgtgttgcgatcttcgctacgcttcccctcgtgggcgtgtcgattgcaatccagcctttgctcgggttcaactacggagcgaagctgatcggtcgcgtgcgcaaaacgttgtggtacggcattgcggccgctacttcgatcggcgtgttcatgtgggcgatcgttcatctgttccccgaggcgatcgtcggggccttcggcatcaaacatgcaaaccttgtcgaattcaccgtgtttgccctgaaagtgcagcttatgatgatgccgttcatcggttttcagatcgtgggatcgaactatttccaggcaacgggccaaccgctcaaatcgatcattctctcgctgacgcgccagattctgttcctcattccgttgctgttcgttctgcctgaaatgcttccgcaaatgctctcgcagttcacgagcctcgatgcgatttactttgcagcccccatggcggatttcctgtccattttcactacgggggtcttcattgcattcgagatgaggcgccttgggcggctcgagcgaggtgaaatcaaggcgaagttctaggcctcgcgtcacccttggcgcgctttcgggcttgcggtcggatccgccttctgggaatatgcgtgcccgaggaggcacgatatggttgagttgcatacgaagaaaaaaacggcgacgcgtgctcggtcgcttgcgttttgcgggttgacgattgcgcttatggcggtctcggcgtggatatccgttccgcttggacccgttccgttcacgcttcagacgttcgtcatggtattcgctctgattgtgcttacaccggggcaatgcttggcatcgatcgggtgctatttggttatcggcgccatcggaattccggtgttctcatcgatgcgcgggggtcttggggtcgttctgggaccaacgggcgggtttctctgggggtttttcgtcggggccgtcgtggcgcttgcggttatgcgcatcctcgaaggctcggcccgaaaagaacaaagcgcctcgagcgcccgcttggatccgcaaacgggcgcgcgcgttcgccggagcagggagcttgcggcgagtttcgtcggcgcttttctgttcgtcgtcgtcatgtacctatgtggatgggtgcagctcatggctatatcgggcatgggtcctgcggccgccttcgttacggcggtggcgccgtttatcgtggtcgatcttgtgaaaacgatcgtgggtgtgctgacggcccgggctgtaaagcgggcgattcgatagaaacatgcaaccgcagcatgctgccgtgccgcctcttccagctgccggcatcttgcggattgcctgcttgccgctcgggcgaagtgctgcagggcggatcgcttcgcccgggatgctttggcgatcttgttcggctacacccacatttggttcggcttgcgaacgccggcaaccggtccgagcttttcggcgatcatggcagcgacgggagcgggaaggctccgcgcgtctttcggacagactgcaacgcagcgcatgcattggaagcagccggcctccgtggtgttcggtgcactgcgcgggatcgcttcgacgggacactgggccgcgcagatgccgcatagtatgcagtcgtcggaaacggtgggaacccatgcggcaccagaagcttccttgtaggggcgattgccgggaacatcgggggtcgaaagggcatccttcgctgccgctttttcggcaacaaggcgagcgaatttcgagacatcctcaaggtcgctcgcgtcggggcgctttgccgcaaccgacgggagcatggagtgccgggcaacgaatgcgcccgatgcgatgattgcgaagccttggcgcgtgagcacatcgttgagttcgataagcgcatcgtcgaaatcgcggtttccgtagacgactgcacttgcggcgacaactcccttgccatcgaggcgctcgatcgcttcgatggccggggcgggcactcgcccggcaaatacgggaacggcgaaaagggcgagggaggtttcattctcatcgggatcggggatcgggcggcttcccccatggatgccaggggctgcaagatcgacgaaggacgcattttggtcgagcgctcgaccgaacgccagcgcgatctgctttgtcgatccggtagggctgaagtggtaaacggacacgctcatgcgcttttcctttcgaaacggcatcagtttgcttcgatgattccatcacttattatactccgaagcgtattgcgcgttgacaagcgaaaacaatgttatgtagtatatgaaactatcatgtaggtacttgcagaacggggatgcctttgaagaaggcccttctcatggttctcggtgcggcgctgtttgcatcggtgttggcgctgctcggctgcgcatctgacaatgcggccgaagcctcgggagcccagggcgatgccaacgcgcctcttttcagcagcatcaccgccgaagaagccaagcgcatgatcgacgagggcggagtgaccatcgtcgacgttcgcagcgaatccgaatataccgaagctcatatccccggggcgatttcgatacccttcgacgagatcggatcgaacaagctgggcgtactgcccgattatggcgagcgcatcatcgtgtattgccgtacgggtgttcagagcaagcttgccgtgggcaagctcgaggatatcgggtacaccgatgtttacgatttgggcgggattagggattggtcgtacgcaaccgagcggagcggaccgatcggctagcttccaccagccataacgtatgcgcaatggggatactaaccagagtagtatgccccattgcggctttcctcaccttatttttcgtatgcactccgccgtttttcatttcatgctctcgattcggacgcatcgacgttggcggatgctgtcatcagcgttcacgacgaggaaggatgggagtgagagtatggataaatcagaaggcatcaaggttccgcacgaaaagccgtatcgctatcaagagggcgaatacaccgtaacgcgcgggagcgcttggtcgggtccgggatgccatctcggctgcggtgtgcttctctacaccgataaggacgacaagctcgtcaaggttgagggcgatcccgagaatccgtttacgcagggccgtttgtgcgtgcgctgtctggacatgcccgagatcgtcaaccacgaggatcggctcaagtacccgatgaagcgcgctcgcgaagaccgcggcaagaacaaatgggagcgcatcacgtgggacgaggcgtacgatatcaccgttgaggagttcacgaagatcaaggaaaaatacggtgccgaatcggtcgtgttcatccatggcaccggtcgcgatatcgctccgtggcaatcgcgtttgtgctggtcgttcggttctccaaactatggaaacgtgctttcgggcaacgcctgctacctgccgcgcgtcgcgggcatggctgcgacaaccggatcgttttgggtggcagacgtctcgcagcatttcgtggatcgctacgacaatcccgattgggtcatgcccgaagtgatgttcatctggggcaacaatccgatcatcgccaattcggacgggttcttcggccactgggtgatcgatctgatgaagatggggatgaagacggtggtcatcgacccgcgcgtcacgttcctggcggcgaaatccgatcttcatctgcctatccgcccaggcaccgatgccgcactcgccctcggcatgctcaacgtcatcatcaacgaggaaatctacgacaaggagttcgtggatctgtggtgctacggcttcgaagagctcaaagagcgcgtccagcagttcccgcccgataaggtggcggagatcacctggatccccgaagagaagatcgtcaaggcagcccgcatgcttgccgagtgcaaacctgcgacgctgcaatggggtcttgcgatcgacatgacgcgcgaggcgattcccgccggtcaggcgattgccgcgctcttccagattacgggcaacgtcgacaatccgggcggcatggtgccccccgcggagatcatggcgtattccggcggatggggacgcgacctcttgccccccgagcaggagcccaagcgcctcggcctcgaccgttacaagctgctccagatgggcttcaagcagtcttcgcccgacgtgctgatcgaaactcttgagacgggcgatccttacgagatccatggggctcacttccagaccaccaacggtcttgcttgcatggccgccgatccccagcgtgtgtacaaagcgttcagcaagtgcgatttcatcgtatcggtcgacctgttcatgacgccgacgatcatggcgcttgccgacgtggtcatgcctgcggcgacgtttgccgagcgcaacggcattcgcgtgggcgacggcccgcagcgcggcgaggtcatcaacaaagtcacgcagatcggcgaatgcaaatcagacatgcagatcaatctcgagcttggcaagcgcctcaatcccgaggcgtggccgtgggatacgcccgaggagatgttcaccgagcttctgaagccgaccgggttcacctatgaagaactgcgcgaagcggctccggtgtacctgcctgtcgaatactacaagtacaagaccggcaagatgcgcgcagacggccagcccggcttccagacggctaccggccgcatcgaactgtggtcgacgttctacaacgccgccgaactcgatccgctgccttacttcgaggagcccgatccgggtccggggtcgacgcccgagctgttcgagcagtatccgcttgttttgacgaccggcgctcgcaactggaattacttccattccgagcatcgccagatcgagcgtttgcgcaagatgcatcccgacccgatcgtgcaggttcaccccgacaagctcaaggaactcaacatggtcgacggcgagtgggtatggattgaaaaccagaacggccgcgctaagatcaggatcgaagaaactcccattctgaccgacccgcgcatcgtggcctgcgaccacgcgtggtggatgccggaggcggatcccgagaagttcttcgacgtgttcgagtacaacatcaacaaccttatggtgtacagcccgggtaagagcggtttcggctcgaattacaagacgagcatctgcaagctctacaagatcgaggatggtgaatagtcccatgacgaaatacggtatcctgattgactatgaatggtgcaccggttgccacacctgcgagttcgcgtgtcagatggagcatcaataccccgttggacagaccggtatccttgtgaacgaaatcggtccttggaagatcgaggaagatgtgtggcagcttgcctacatgccggttccgaccgatcagtgcgatctgtgcgccgaacgcaccgagatggggaaactgcccacgtgcgtatcccactgccaagcgaaatgcatggaatacgggacgctggaggagctttccgccaaactggctgagaagccgaagcaggcggtattcgctctcgactaagctttagtgaggcgggtgctgcatttcccgaagggatgcggtgcccgccgttgcgaaaggaaacacgatggacaccatggttttggtggtagcggcgatagcagtctgcgtcgtgatagagatgataggatttcgagcctacaagcgtcacaaggctaaaaaggaatcccagttcacgaaagagcatcttgcggaagtctacgatgatctgcaggctgcgcgcgcattttgcctggcggccagacgctggtacaaagaacttgcgttgcgcgcccgcgaagagggccgtctgcgcgatgccgccgttctcgaagccatggaagcgggggagaaatcccatttgtccgaaatcgaaagcttccgagagcggttgcatgccgaatcgatcgatcccgcaatcatgcaggttgcgggatcgtcgcttgacgatgcgctgcgttccttcgccaaaaagatagacgagtgggcaacggagacgtgctccgatttttcggcgcgtgcccgcttgcgcggatacggcgatatcgcacgcatgtacaagcgcatgcaagaggtcgagagcctctacgcgggcatctgcctcgacatcgccgagggcgtggatgacgggttaaacgatctgtcccgatgccctacctgtggaaccatcgtgacgggaagacgtcctgctttttacaccatctgcacgcagccgggcttcgagttcgtcgccgtgcctccatcggcggatgagggggatgcttcgggcaagcaggaagacctttcggcaaaaacggtcggctgcgcatcggcgtctgaatagcagttcgattcgaaaggaaggcggacaacccgccttcttttcgtattctggggccgttctcccctccttcccgctgttcggctgatgcgcgaaggcgggctcgtttcggcttttgccggttgtcttctgggaggcccgatccatggatgccgttcaattcgaggatgttgtccaattcgagcgggttgcccagcctgggatgttgtcctgtgcggtgctctctcgggtcggagcatccatcgtatcgtatcgtatcgtatcgtatcgtatcgtatcgtatcgtatcgtatcgtatcgtcctggctattgcacccagcgggttgcgcgctaaggccgggcgtgctcttagcccgaaagaagcgaccccggacattcaggaaagtccggggtcgcgctgttcgtcgggctgtgcggcttgcggttagtagcccagcatgctcacgatcggagcgaggatggtcgcatggagaacgaccatcgcgatggtggggataatgccggccttgaagaaatcggccatcttccactggttgtacttgaaggtcatcatgttgttgctgtccacgccgagcaagaacgtgctgttcgcgttgaaggcgatgatgacggcgaacactgctgcggatacgcccatgctcgggcccatcgctgcaagcggaatgaggctgatggcgattagcgccggtcctacgggaatgatgaggcgcatgagcggcaaggcgatggcggttgccgcgacgactgcgaaggcgctcacggcgagctttccaacggttgcgccgaacagccagcttgcagcgccctgttctttgatgccgcctgcgatcgattggacgcagccgatcagaagcacgatactccactggacgcttgcgatgtactctttccagttgaggacgtcgatgccggggaggaagaacacggcgaggcctgcaacggcgatggcggtggcatcccagccggtccagttgcttgcaatccatgccacaatcatggcaagcaggatgacgagaaccttcttgtcgaatccatcgagcttgccgatggaagcgccgttcttctcgatggccatcatggtcgcttcggaaatgcggtcggttttgaagatgagcgaaaccgacagccagctgacgatcaggacgatgattgcgatcggggcgcagatgatgatccagtcgaggaacgagatggtgaacccggcgttggcggccagcatgttgagcgtcatgatgttaagagcagaccctgcgggcgtgatcatgccgcccatgatcgacgcgtaggcgataccgatcatgagtgccttgccgaggttcgcggcgtgtttcgcatcgccgttctgcttctcgagatcgatgatgctcgacatggcgatgccggcgaagagcgccgtgcagggcaggttggagacaaacgcagaaacgacggctgtggcgagcatgaatgcgagcacggtcgtttttgcattgcccttcgtgaggtgcatgagcgcgaagacgatcttcgtcggtatcttcgtcttgaggagcgccgaagtgatgccgaacgacgcgaggatgaagaagatgacgttgctgatgaagttggcccagacgcccggggtgccgttgtaggcgaatattccaaatccgggcataaggcacatcagggcgaggcccgatattgccatcggtatgggctcggtgacccacagcacgatgccggcgaccatgattgcgatggccatcttcccctcgtaggtcaatccctccggaacgggaaggaagtgcgcgatgataaggatcacgattgcgacgcctatcaaagcgaggcgcttgccgagcgatttttcttgcgtgttttgttttgttgcagccatgtgatcgatcaacccccttaatagattagtacacggacactgcttgcactgcggctacccgtcccctttctcgcacgccgccgcaatggcgcattcttgatgcatctactttccgtgttttcgccctcgagtgaatccgcttatcctcactaaaacgtacgacgatcatcaaaaaatgcgcctgatagctcgaagcgagacaaatcctactctcggtagtacggttttcggagcggattttgcaggagcgagattcgcgcttggggctgcctttcttgttcagatccgttccgcttggcctccgttcgcccggttcttggcagagctggttttgccattcggctccgatgcgtttcgaagtcgatccgcgcccgttcgatgcatggtgccgattgattgggaatatgatatattgtgcgactcggtggcgtgggggttcggcgagtgctttgatgggagaagatgggtgcgctcgtgcgcatgtgaggcttttagcgcactgtttgcacaggtcattgcttactaccttcggtagtatccccgtgttttcccgcgatggtactcattttgcgatggagcaggaggtgttttccgtttccaagcctgattcgtcgccgaccgctcgcgggtatcgtttccttcggaaagccttggcataagttctctttgtccagagccgttcacgtgttgcacgacgagtagggaggatcgatctgcaatgaaggaaaaacgttatgcggcagatggtgggtcttcggttgcgaagcggacgctttgcatcggcatcgcggtagttctcattctcgcggcatggctcggtcctactcccgaggggttgggcgaggcggggaagatgtcgcttgcgcttatggtggcgggcattttcctgtgggtaaccgaaccggtgcccgtggccatttcgggcttggtcatcatgatcctcatgccggcattcggcattctcgaatacaacgccggggtatgggcggggtttgtcagcagcgtcatcttcttcatcatggcatcgttcggcatcacggcagcgcttctcaagacgaaggtgccgacgaagatcgtcttcgcgctcatgcggttgacgaagggcaattcccgagcgacggtgctcgcattcatggtggctgccgcaatcctgtcgttcttcatttccgatctgccctgcacggcgctgttcgccggcatcgcggtgagcagtatccttgaaatcgaggggtgtgagaagggctcctccaaactcggcaaagcgctcatgatcggaatcacgtacgcatcggtggtcggcgggcaggccattccgtcgggcagcgcgatgaacatcatggccatgaacgtgctcgaggctaataccggcattgcgatctcgtttctcgattggacgctcatctgcatgcccatcgcccttgtcttgttggtcgtatgctggttctcggtgacgcttgtgttcaagcccgagccgatttccgagaagacgatcgcctgcatcgagaaaaagggtaaagaggtggggaggttcgaggcgatcgattggaaggtgcttgccgttatggccgtcgtcttcagcctgtggattgcaagcaactggacgggctgggatgccaccgccatcgccgtgctcgccctcatcctcttcttcgtaccgggaatcgacgttctcgattggcgggagtacgtggccgccgtttcgtggaacatcgtgcttctgatcggctgcgtgcagtcgatttccggcggcgtgaaggagcagggtgcggcgagctggctgttcggttccaccgtcggcaaggttgcgctcagcgggaccgccatcgtcgccgcgtcggcggcgttgcttccgctgctgcgcctcgtcatccccgtggggccggcgttcatcgcgatcagcctcatcccgctgtgcaccatagccggcgcgatcggcgtgagccccgtcgtattcgccgtcatcgttgcggtgaacgcatcgacgacgtttctcatgggcgtcgacggaaacaacatgctctcgtaccgatacggctattggaagatggtcgacttcttcaaggccggggtcattccgaccgttgccatggttgccctgcacgcaacggtgcttatgccgctggtggctttggcgggatactagggtcgtttcggttgcggcgccctgcagcgtaggcgggcaccgctcgccgcgcttcggcggggcattgcgaggccctcgcatcgggcatgctgcctctgatgcgagggcctctttgtccttggaccgtttctagcgaaatacgacttcggtggaatcgacgatggtgatgagctcctgttgggaattgacacccatcttctgatagatgtggtacacgtgagttttggcggtgtatgcggaaatattcaattgttcgctgatgaactgggcgttgcgtcctttggcgagaaacgagagtatctcggtttctcgattggacaggccgtattcttcggctgccttcgtgcatcgctgcttgaaatgcccaccttcggcgatttcgttgtcgaagctcttatcggcaaatgcgttgtctttgaacgggacgaacgccgcaagtattgccaaggccaaaacaagtccgaggcctacaaagggaacgaaatcgaacagggcggcatcggcgccttggatcgcaaggcatgcagcccagctgatagccatgccgagcggcagcacgagttgtccgcgggcgatgcgccaaaacggcgaaggttggccgcttgcgaacccgacgagagccgcaaggttcgcgaagtcgaagtagatgtaagaacccagtagaaagaggcagcatggcgtttgaaacgactcgtcgagaaaggcgaggccgagaaaccctatcgcaacgaacaggagcgtgagcttttcggcgattccgaagggaatgtagcgcttgataagcgtcgtgcaacccatctgcaccaatcctccgatggcaatggcgagcgccgcaagggccggctcgaggctttcgatgttgtaggagagatggtagattgcgaatccgaacagagcgccgaagaccgcaacggtgaatccggtgagagggaagagcttggtctgttcgacaggttgctcgggcattttcccgctgcccgcaatgtgcgcgcgcaggtatgcgaacgtgcctagcgagcagatgggaagcagcagcaaggcggcttcgccgtagggcgaagcaaggttgcaggaaaacaggtagatgatggctccgagaacggcacccgatgcgaggaacgcgccgacatccttttgccaggcgaccatgaacaccttgggccattcgagaaaaataagggagaacccgccgcctgcaagagcccaaacggcgatatcgaaccccacgggagccgatcctgggctggcgatgaggttcagcacgcccagcgggagcgtaagggcaagagcgatgagcggtatcgggtcggggctatgccgatcgaacaggtttcgcttgaggtaggcgagcatcatgacggcgagcatgccgatgagaaatgccagcttgaccgccatggacgcttcgagtccgaggtgctgcgcggtgcctgggccgaacatgagcaggtaaaaccaagcccagaagaacgcaaacccgactgaagccatggggagcatcgttctgacatgtgcctttttgagattcaagtcaatcaatggcataagcttctcgcgtatcagatagtggggatcgtcattgatgattatagccgattgccatcatgtgttgtcgagctatcgaagcctgggcacatcggccggaaggccctctgtgcccaggggatgatgcgaaccaaaaagatagtttgaacagcagatctacaatttcatctactgcttcgggggagcgacgggagcttggggagccccaggagctttgggtgcccctggggcagcgggtgctgctcccggtgcacctggagcaccgggcatgccgggcatagcgggacccgaagggagctctgcgccgcattcggggcatgtcgtggttcccgcggggcaggttgctccgcatttcgggcaggtcgcatcaagggatactgcagctggtctgaagcacatggttttctccttgcatcggtgactgacggattgcttcgatgctaggtgctttgccgcgttcccgaaacgcaaggaaagaggtattcgttctgcacgggatacgaatgtgggtagtatgagggggtaagcaaggtatcactctgggaatatgaatgatttgaaatgggaaaacgcaactactccgacgcctgtcttccgccgttggatctggctgcctcgcagaatgccttgaacagcgcgccgtcgtgttcggtgcgggttgtcgtgatgccgattatcatggcgctacgatacggcgatcgaggggatggcgacgatgaaacaggcgccgccatcgggcaggttgagcgcttcgacggtgccgtcgtgcgcttcgacgaccgatttgacgatggcgaggccgaggcccgtgccgcccgtgcctcggctgcgcgacgtatcggcgcggtaaaagcggtcgaacagacgcttcggatccacatcgccgaacccggcgccgtcgtctttgacggcgatcacggaattgccgcgtaggccgaacagctctatggtgatgtgtccgcccggctcgatgaagcgactcgcgttctccacgaggtttgaaagcacctgtttgagccgatcggggttgccgagcacatcgggtgcttcgccgattatctcggtgatcgcgcccctgtcgcgcaagatgggatcgagcgcatcgaacacttctcgcgacagcattttgagatcgacgtgttgcagctcgtagcgcacgctgtcatcctcgatgcgctgcagggtgagcaggtcgtttgagagacggccgagccgctcgctctcgtcgatgatgatcttgcagaatttgtcgtgcagttcgggcggcagatcggggtcgagcagcatttcggcattgccgtggatggcggtcagcggcgtgcgcagctcgtgggcgacatcgctgatgaattcggcttggcgtcgttcccagatggcgagatcggactgctgaacgagcgcttttccggcaagctccccgaaattttcggcgaggcagtccgcctcgtgcaggcgtccgtcggggactatgcgcacgttcgtgctgcccgaacagaacgccttgacctctgcgcagagtatacgcaaaggctcggagaggaagtgcccgatgagcaagctgatgacgaaggtgatgcaggcggcgggcagcagcaagacgaatgccttggcgggcgcatcgaaagcgatgacgcaaaccagcacgacgatcgtgcaggccagaagcgtcaacagcgtcgaaaggagcgaaaaatatgtctgcagccgtttgatggcgagccttgacgcagcgtcgggctcgggcggctattgcttgaaacggtatccgtagccacgcaccgtttcaacgaggccgggatcgtaaccagccgcaccgattttgtcgcgcaagcgcttgatgtgggtatcgacggtcttcgtttcggtcaggtactcccatccccatgcatcgcgaagcaggtcttcgcgggaaacgaccttgccggcgctcttcataaggctggcaagcagttcgaactcgcgcggcgtcagatcgatttcgccgctttcacccgaggcggtatgggcgtcttcgtcgagggtgatgccgcttgcggtgatggcatgggtcgtgcccgggaagtcgccgccgttgccgcgacgcagaagggcgcggacgcgcgcgatgagctcgcggacgccgaagggcttggcgaggtagtcgtccccgccgatttcaaggccgacaaccttatcgagttcggtatcgcgtgccgaaagaaacagaaccggcgcagtcgttttggcgcgaagcctgcggcacagctcgtatccgtccatgcccggaagcatgatgtcgagcacgaacagatcgtaggggttctgcatcgcgagggcgagggcgtcttctccgttgtcgacgacatcggtgtagaaaccctccttcttcagggcgtaacttacgaactcggtgatggacggttcatcatccaccacgaggatgcgactgggagattcgttcatgtccgacctttctgaacaggtatcaacgccgatgggcgtccagtgattgctataatagcactatagacagaatggttctcgcccggggggattgtcaaaaacatgttacttgctatagacgttggcaacacgcaaacggtattgggcctgtacgctggcgataagctgcttcatatgtggcgcgtggccaccaacaaactgcatacttccgatgagcttcgcatcaaggtcaagccgctgttcgaatcggagggcatcgatgcatccgaggtcgacggcgcagccctcgcatcggtggtccccacgctgacggagtcctggcatgatgccatggtgaccatgctcggcaaggagccggtcgtcgtcgacgcccagatggcgggcgatctgttcaaatcgacctatgcgcatccggctgaggttggagccgatcgcgtcgccgatgccgtggcggcgagggttctgttcggccccccgtgcgtcgtcgtcgatttcggcacggccaccaacatcgaagtcatcgaccgagacggctactttatcggcggcgtcatagcccccggcgtagaaacgtcggcgaacgccctgttttctcgggcaaccaagcttgcggccatcgacctcgttgatccgaaaacggcgataggcggttcgaccgaggaagccattcaggcgggtatcgtgtacggcgaggccgatcgcgtcgacgggctcatgcgtcgaattttcaagcagctgggttaccagacgcaggttattgcaacgggcggcttggccgaatcggttgcccgcatctccgagaccatcaccgtggtcgtgcccgagttgacgcttgatggccttcggctcatctacgatgcacgcaggtagcgggattgcgggaacggcaatcgtctgcgcgaggatggctgcagcggaattcggaggcagagccgctgcgtatgctgaaaagcgcatcgatgcgaaagaccgctgacttcgctcttcgtggtgcgcttgcactctgattgcctgtactgctgttcttttgttgtatgccccttcctatacttttccatgctcgccgtactgaacatagtggaaaggaacatgcaatgaaagaattctcgggactcgccaaggtcggttacttttgcatcgggcttttcggcggccttcccggcgtgctcgttgcctggcttgtcggccatgacggctggggttggagcgaaggcggcaagaaattcgcgtggttcggctgcctgttcttcttcgtcgtcgccatcgtcctctcgctgacgggcggtctcatggcgctcattgccgtgatgacgggcaacgcaaccgtcacggtgtcgtaaaagctgcaacggctttcgcttcgattccggcgccgcgcgtgataacacgggcggcgcttgtcttgcgggcagctcttgcttcgcatgggcgcagggcggcgcatggcgcgctgttggcggcatctcgttccccctcggctggtcatcttgtgcgcttggtggaatatggtgtgcgcattgcataccgaacaagtagaattgcctgtatccagtgcccacggttttgggcgttcagacgagaagaaacgagagagtgagggctcgacgtgttgagcgacattgaaattgcccaagcaacaaccccgaagcatatccgcgagatcgccgaaaccgccggcgttcccgagcagtacctcgaactgtacggaaactataaggccaaggtcgattacaacctgcttgccgacgaggagcgcgcttccggaaaactcgtgttggtgacggcgatcaatccgacgcctgcgggcgagggcaagaccaccacgacagtcggcctttccgatgcgctcgctcagctcgggaaaaacgtggtcgtcgccttgcgcgagccgagcctcggtccggtgttcggcatcaagggcggcgctgcgggcggcggatacgcccaggttgttcccatggaggacatcaaccttcacttcacgggggattttcatgcgattggcgcggcgaacaacctgcttgcggccatgatcgataaccatatccagcagggcaacgcgctcggcttcgacgtgcgcaagatctcgtggaagcgctgcgtcgatatgaacgatcgccaattgcgctacgttgtcgacgggcttggcggcaagaccaacggcatgccgcgcgaagatggcttcgatatcacggttgcaagcgaaatcatggcgatcttctgcttggcgacctccatcaccgacctcaaggagcgccttgcgcgcatcgtggtcggctatacgggcgccgacgagcccatcacggcgggcgatctgcgcgcgcagggcgcgatggccgctctcctgaaagacgctctcaagcccaacctcgtgcagacgctcgagggcacgcccgcattcgtgcatggcgggcctttcgccaacatcgcccatgggtgcaactcgatcatggcgacgcgcatggccatggcgcttggcgattactgcgtgacggaagccggtttcggcgcagatctgggggccgagaagttcctcgatatcaagtgccgcctcgccgggctcaaacccgatgcggtcgtggtcgtcgccacggtgcgcgcgctcaagaaccacggcggcgtgtcgaaggattcgctcaacgaggagaacctcgaagccctcgaggcgggtctcccgaatctccttcagcacgtcgagaacatcaccggcgtttacaagctgccttgcgtggtggctatcaaccggttccccgccgataccgaagcagaactcgcgctcgttgaagagaaatgcatggagctcggcgtgaacgtcgccctttcagaggtgtgggccaaaggcggcgcgggcggcatcgcgcttgccgaggaggtcgtgcgtctgtgcgaagaaccgaacgatttcacgttctgctacgaggacgatctctcgcttgccgagaagatcgaagcgatcgccgcgcgcatctaccatgccgacggtgtcgatttcacgccggcggcaaagaaggagatcgagcagctcgaatcgctcggattcggtgcaatgccggtatgcatggcgaagacccagtacagtttctccgacgacgcctcgctgcttggggcgccgcgcggattccgcattacggtcaagaaggtcaaggtgtctgcgggcgccgggttcgcagttgccctcacgggcgatatcatgacgatgccggggcttccgaaggaacctgcggcgtgccgcatcgacgtggacgaaacggggaagatctcgggactgttctaatctgcatcatcgcccgttcgatcgggctcttgaaaacggatgccgctttcgggcggcgaatcgaccgagcacgacaggagacgagcatgctcgatacgacattcatcatggatttggcaagcaaggcgccaacgccgggcggcggaggcgcgagcgcctacgtcggcgccctttcgtcggcgctcggttcgatggtgggcaatctgacggtgggcaagaagcgctacgaagccgtcgaagccgatacctacatcgtgctggagaagctcgccgacgagcgcacgcagctcatcgggctcgtcgatgaggatgcacgcgcgttcgcgccgcttgccgcggcgtacggcatgccgaaggcgacgcccgaggagctggccgaaaaagacagggtcatgcagcaggccctcgtcggcgcctgcgaggttccactcgatataatgcggtcgtgcgcccatgtgatcgacctttgcgagtttctcgcgtacaacggaagccgcatggtgctttccgatgtcggcgttgcggttgcctttgggaaggcggcgctgctcggagcgagcctcaacgtgttcattaacgcgaaagacatcgccgatcgcgggcgcgcaaaggcctatatcgaagaagccgaccggctcgtagacggctcgggtgcgcttgccgacaagctgtacgcatacgtgctcgacgaaatcagataggtggatcatggctgaacgtcttgccgggaaaccggttgtcgaaaagatcgccgaggagctgggttctcggataggttctcttgcggagagaggtgtcgagtgcgggctggctcttctgcgcatcggcgagaggcccgatgacttgtcctacgagcggacggcggtgaagcgcgccgaatcgcttggcatcaagcttcgcaggaccgtgcttgaggacggcgcgtcgcaggatgagatagaggcggcgatcgatggcatcaaccgagacgcatcggcgcacggatgccttatgtttcgcccccttccaggcgatatcgacgagcaggccgtgtgcgatacgctgaaaacggaaaaggacatcgacggcatctcttccgcggcgttggccgccgtgttcatggatcgcgacttcggtttcgccccgtgcacggctgcggcgtgcatgaggatgctcgatttctacggcatccccctcgagggtgcccacgtggtcgtagttgggcgcagcctggtaatcggcaagccgattgccatgatgctcttgcgccgcaacgcgacggtaacgctgtgccattcgaggacgaaagaccttgcgtccaccatgcgcgcggccgatatcgtagtgtgcgcgacgggtcgtgcgcgcatgttcggccccgattgcttctcgccgggtcagacggtgctcgatgtgggcatcaatttcgatgatgacgggaatctgtgcggcgatgtggatttcgatgcagtcgagccgatcgtgggcgccatcacccccgtgccaggcggagtcggatcggtgacgacctcggtgctgatggcccacgcggtcgaggctgccgagcgcagcgtcggcgtctagcatgttcagcaggaaattcgtcatagcggatcccggtaagtgcatcgggtgcaaaacgtgcatggcggcatgcttgcaccgtcacgatgtcgagggcgacgtgcccgtgccgcgtttgcagctcgtattgacgcgtaccgtttcggcgccggtggggtgccatcactgcgtcgatgcgccctgcgtcgaggcgtgcccgaccgggtgcctgtattccgatgacgagcgcgtgggcgtgcagagggaaaagtgcatcggctgccgcaactgcatcctcgcgtgtccgtacggcgcggtcgacatcgtcaccgagcttctccccgcttccgaagaagatggggaaggggagacgaagaaggcgaagcgccgcagaaaccgcaggaagtcgaccgttatcaagtgcgacctctgcgagggttcggcgcagggatccgcatgcgtgaaagcgtgcccgacgcatgctctcaggctcattgaccagcgttttctggaaaagggcgctcagagcaagcgcaaggaggcggcgaaggcgacggctgcgtactcgacgctgcgcctgaacgaagatttgggcggaaggtaggccatggagaagcacataaccgtatgtccgtactgcggagcgggctgcaaaatgaatctgatagtggaaaacggctatgtcgttgaagccgagcccgccgatggcgttacgaaccagggggagctttgtctgaagggcctgtacggccacgatttcatcaacgataccaagatactcgtaccccgcatcctccacccgatgatccgccgggaaaaaggcggcgaacttgaacgggtaagttgggacgaggcgctcgacttcacggctgagcgcctcaagcgcatcatcgaggagcacggagccgaagccatcatgcttaccggttcgtcgcgcggtccgggcaacgaggcgaactacgtgatgcagaagttcgtgcgcgcatgcttgggcaccaacaacatcgataactgcgcgcgcacctgtcacgccgcttcggtcatagggctcatggaatcggttgggtcgggcgccatgagcgtgagcattccgctgcttgaggaaaccgattgcatcatgctcatcgggtacaacccggcggccagccatcccatcgtcgcaagccgcatcgtgaaggcgaaagagaggggtgcgacattgatcgtcgccgacccccgcgttatcgagaccgcgcgaatcgccgatctgtaccttccgcagaagaacggctcgaacatcgcgctcctcaacgcgctcgcctacgtgatcgttgcggaagatctggccgactgggaattcatcgagaaccataccgaagggttcgaccgatggtgggaggtcgtgcagaattacgctcctgaaacggttgccgaagcggtgggcgtgccgtctgagcagatccgacaggctgctcgcatgtacgcaacggccgaaaccgccgtcatcgggtggggcatgggggtcacgcagcagcgccaaggcgtcgacagcgtgcacgccatcgcggcgcttgcgcttatcaccgggcatatcggcaagcatgcgagcgggcttgccccggtgcgcggtcagaacaacgtgcaaggatcgtgcgatatgggcatgtggccgagcctctatcccggataccagcgcatcgacgacgaggcggtgcgcgagaagttcgcccgcgcctggggcgtgccggttgaaaagctgtctcccatcgagggtcgcaaactcaccgatctgccgcacggtgtggccgatggcagcatccgggcgttctacaacttcggcgaagacccgttgcaaaccgaacccgacacggcccagatgaggtgcacgcttgagagtctcgatctgctcatcagccaggatatcttcatgacgcagactacggctttggccgatgtggtgctgcccgctacgtcgtggggcgagcacgagggcgtgttcaccgcttccgaccggaccttccagcgctttaccgccgcggtgccgccgaagggcgaatgccgccacgattgggagatattccaggatctatcgtgtcgcatgggctatcccatggcgtatgggtccaccgaggagatatggaacgaaatccgcgagctgtgcccgttgttcttcggtgccacctacgagaggatggaaggcgtcggttacgcccagtggcccgttcccgagctggaccaccccgggtcgcccgagctgtacgcgggcggtgcgttcacgacttcagacggaaaggcgcatttcttcgcgaccgagtacgctttgccaaccgagttgcccgatcgggaatacccgcttgtgctttgcacggtgcgcgaagtggggcattattcatgtcgctcgatgaccggcaactgcaaagcgcttgcggcgcttgccgacgagccgggttacgtgcacatgagcccggtcgacgccgaagcgcgcggaatcgacgaagagcagctcgtctgggtgtattcgcgacgcggcaagatcatctcgcgggcggcggtcgatgagcgcatcaacgaaggtgcggtgtacatgacctaccaatggtgggtcggcaaatgcaacgagctcaccttgcatgtgaccgattcgcagtcgggcacgcccgaagacaagtacagcgcatgccaggtggagcccatcgccgatcagctgtgggccgagcgccatatgcaggagctgtacacccagctcaaggatcgcctgttcaaagaggcgtcccaccaggatgcacccgccgaaccaggggaaggcgacgcgccgtgcgtcgaacctgcccgcgaaggcgcgagcgatcaaagcgatgtgaccagggcgcgcgaacaagcgatcgccgaggccgagaaggcagcgcgcaaggccgtcgagacccagaacgcccgactggcgcttgagcgggcgtggggatctgaggagacggccgtttaggcggtcgagagaacggctgctcggacagccttcgggcgaaagggagagcgaggtgggagtgtgaacaggtttgttatcgtcgatcctcatcggtgcatcggatgcgacgcttgcatcgtcgcatgcagcgagggtcatcgaaagcttgccctccgtcctgccgcgcgcatatcgcttgtcaaaacgcgcgacatctcggctgccgtcacctgtcaccagtgcgagggatcgccctgcttggcggtatgcccctcgcatgccatcgtccaggaagacgatcggctgcaggttgtcgaagagctgtgcacgggatgcctcgtctgcgctcttgcgtgcccgttcggtgccgttcatccgtcgatgccttcgacttcgaggccgcgcggcgagctgttcgggcagacatcgacctctcgctcgtcgggtctgctccgccaaaaggagacgggcgattattcctgcgtcgcgatatgcgatctctgcgccaaaacgcagggtggaccccggtgcatagcgtcgtgtcctaccgatgccctttccctggtcgacgaggaatcgcttgagctttcgaatcggaaaaagaggctcggggccatcgacaagatgatggttgccctgcgcggggccgatcggggggtggcggatcatggtcgatgaggttggaagcggatcttttccctttcgggaaaaaatgctctgcccctgcgccaagggcaggccccatcatgatttcggcgcctgcatcgcgtgtgccgcatgcgcggttgcatgcgagccccgggcaatcggcatcgtcgtcgacgaggacgagggaacgcttgtgtgggcgcttgatttcgagctgtgcacctcatgcggtgcgtgccatcgcgtatgtccgaccggggcgatgggccttttgcccgataccgatctggccgacgaagccgagcctccgaaacggtgcgtgttcgcgctcgcggagtgcgacgagtgcggtcgttactacgcatcgcgaaaggaggtcgcatacgcgaatcgattgctttcgcggctcgaccacgccgatgcggcccttgcccgctcgatgactgcgatatgccccgaatgcaagcggatccgcgatgcgaaagctgccgacagacgaacgggcatgggcggcgttcggtagcttttgtgctgcatgcggtacggaaatcggctccggcgccgttcggcttgcgttggaaccgaacggcagcagaccatgctgaccttgtgcaaagctggcctagcgctggcggttgtcgtatcatagcacccatggcaaacggactgacatacgtgaggcaaaccacttcgaccgaagcgaccaagcagctggcagctacgcttgcgccgtacctcagacccggcgacgtgatcgtgctcaacggcgatctcggcgcaggcaagactcagttcgtccaaggggtggcggcgggccttggcataggcggccccgttacaagccccacgttcaacatcctgctgagctacatggacggtgcgcttcccctgttccatttcgatctgtatcggctcgatggttccgatcagcttgaggacatcggctatttcgagacggtcgatgggccgggcgccactttcatcgagtggggcgagaagtttcccgaggccttgccttacggatatctcgagatcgatattaccgtcaacgaaagcggcatacggctcgtgcaggcccattcgtttggggagcgcgcacgaaacctgctgttcgtttgggcgaaggattcgaaatcccgccttgcgcagactcaataggatgaagcgcgcaatgtacgtcggccgatgcgccgcaacttccgaaacaacagaatcgaagacgtgaacacaatgagcgaaccaacccattcttacattctcgcgttcgacaccgcaaacgaggttatcgcaatcgggctcggcgttgccgacgaagcggatcgaagcatttccgccgtcttttcggtggaggtcgaagctcgccgcgcatcgaacacgcagctgctgccccgaatcgatgcgctgcttgccgagcagggcgtgtccaaaggcgatatagtttgcgtcgtctgcggtcgcgggccgggttcgtttaccggcgtgcgcatcgccatggccacggcaaagggcatcgcatcggccctcgaggttcccttgtacggcgtttcgacccttgactccatagcgtggaacctgcacgatgcggggttgcgcggcccggccgtcgtggttgcagacgccatgcgcaaagaggtgtatcccgtgcgctacgagctggttgacgagggcatcgaacgcctggaagccgacagcgtggtcaaggcggaaacggcggccgagatgcttgcggttggaaggggagccgcttcggcctccgccgatggaggcggtgttgccgggtcgtccgattcggttgttggcgcgaacgccccggcttcgatcatcgcgggcgatgcgctcaagaagtacgccgaactgttcgagctatgcggcgcattcgccgacgaggcgctttggacgccgacgggaaagggccttttgcgtgcggcgcaggaggcgtggcgcgcaaatctgctcgatccgttcgatgccgccttcggcaaccccgcctttgcgcttccggtgtatacgcggctttccgacgccgaggaaaacgaacgcattcgcctgagtaaaaacgagccgaagaacctgcgcacaggcgttcagaatgccggcgttcggcgcgaccagcagccgtctgcgcatgatacggccatcgaaaacgcccgagcggatgaaagcggcatcacgtaccgcccgcttgatgcggcgcatgcgcatgccgtcgccgagcttgaatccgagctgatgggaaccgacgcgtggagcgaggcgctcgttctcgacgagctgccgcgcaaggatcgcgtttggtgggccgcctacggtacggatgacatgcttgtcggatatgcggggggctggatcgtcgacggtcaagtgcaggtgctcaaggttgcggttgcgccggctcagcgccgccgcggcatcgcgcgatccctgcttgcccgaattgcaagcgatgcccgcgatcttggagctaaagcatgctcgcttgaggtgcgcgcgtcgaacgaaggcgcacgggcgctgtatgcatcgcttggcttcgaatcgattggaacgaggccgaagtactactccgatcgggaagatgcggtcatcatggaaggccctctgccgctcgatcaccatgatgttgcgggtatggagttgcaggttcacggcgggaaggctcttcgcgtcgaagatggctgcccgcctgttcgatgcgatgcggaacggaggctcgacgtctttgccgccgcatccgatggtcgtggtgagcgcatcgaggcggcggcacctctcgttctcgccatcgaaacctcgtgcgatgaaacggcggctgccatcgtcgacggatcgggccagctcgtttccgacgtggttgcttcgcagatcgatttccacgcacgtttcggaggcgtggttcccgagatcgcaagcagaaagcacatcgaggcgatctgcggcgtggccgacgaatgcctcgatgtcgcggccgctcgaatcggcgtgccccggctcaggtggcgcgatctttccgcagtgtccgtgacctatgcgcccgggcttgtgggcgcgcttgtggtgggggttgcgttcgcgaaaggcgctgcgtgggcagcggatctgccgttcatcggagtcaatcacctcgaagggcacatctatgcgaacaagatcgccacgcccgatatcgagccgccgctcgtggtctccctcgtttcgggaggccataccatgctcgtgcacgtcaaggcttggggtgattacgagacgctcggctcgacgctcgacgatgcggtgggcgaggcgttcgacaaggttgccaaagccatgggcctcggttatccggggggtccgatcatttcgaagcttgccgtcgaaggggatcccggggcgattgattttccgcgggccatgctgcattcgggcgatctccgtttttcgctttcgggtttgaagacggcggtgatcacgtatctcagaaacgaagaggcggctggccgcgaagtgaacaaggcggacgtggcggcgtcgtttcagcaggcggtcatcgatgtgcagatagcgaaagcggagatggcgctcaagcttaccggcgcaaaggagttttgcctgggcggcggcgtggcggccaatcctgcgcttcgcgccgcctacggagtcatgtgcgaaaggcttggcgtgcgcctgacgctgcccccgatgagcgcctgcaccgataacgccggcatgatcgcccttgtggcgctcgaccgttatcgcgagcagaagttcttcggcctcgacgccgacgcccaagctcacgtgaacctcgatgagccgtactaggcgaatcgggagaatgctgatggcgaaacgatgctttcgatgcacggttttgaagccgctttgaggatgggccgtgcatcggatcggtaggaggccttgtgcaggaagcgtttgactctgaaaaagaacacgggagggctttatctgcccggaccatggaggtgctcaagggcaatctgcttctgattatcggaagcatcgcctggtgggggagccactatctgttgctctggaacgcccgtatcgcctcggccgattccctggtcagcggatacgatggccgattcgtgttgacgatcgcggggaccgtcgtcgccttggggctggcagccctcgtttctcggcgcaaaccgcagttctcgtttgccggctggcgcggttcgtatgcgatcttcgccgtatgcgcttcgggtgcgctcggcctgcttgttctgcccacgctaggcgaggcgagccctttggcaacggcggccggtgcagtgctttcgggcgtagggaacagcttcatgctgcttctttgcggcgaattgcatgctcgcatgggggtgcggttcatgccgctggcttttgcgatcgagacggtcgccggagttgcggtgttctttcttctttcctggctgccggtagttggggagatggttgcgtctgccctgcttgtgataatagccgcggtgctttactgtgcctacgcccgctcatcatgcgtttcgtcggctgactcggctcgtgcaaaagtcgatatgaccgtgaagccgttggtggttctcgccatgttgactgggtttgcctatgggctcgttcgtacgtttgcaatcggtggccttggatcatccggaacatcggcgggcatggaatcggaatatataggcacctgcatctgcgcgcttcttctggttgccgttttccttcttcaggatcggcaatccctcttcgagcaatgccttcttttcgtcgtgccccttgttgccacgggtatgcttttggtttcgctgcacggcgtcatcgatgtcgtgccgacggccatcaacacgggaggatttgcctgtttcttcaatcttatgtggtacttcgccgcagtgctggctgtacacgataagaggaatcgacttcctttcctgatcgcgctgctgttcttcagcagccagctcggtcaattactcggcgcgctcgtgccggcgcagttttcgaatgcgttttcgagcggactgacgtatcttctcctgttggtgtcgacgcttttcatgtactatcgcgcaaaaaccgctcagagaagcatacgcaaagacgacgtttcggaaagcgcgtttttggccgggaccgaagatcgcctggaggacggtgcggccgatctgtggatccaacggttcggattcagctcgcgcgaggcggagatagcgatgctgctggtgcgcaggacgccctacaagcaaatcagcgccggattgttcatttcggacaatacggtgaaaacccatgttcgcaacatttaccggaaagcgggcgtatcttcgcgcgaggagcttgtcgagacgttgcgcgacatcgcgaaaaatgggtgaaagggcgcagtagagcttggatattcccagctcaaagggctcggggaaaatcacacgtaattcgcgattgtcggtggtcgatcccgtttctagaatccttctgcaggtaatggaacacaccgaatggagggattcgccatgcgtgaaaccaaaggaaaccttgaccgtcgcacgttcatgaaaggcggcatcgttgcggctgccgccgcagcaacgggatcgttgctggcatcgtgttcgccgcaggcaaccgggggtgctgcaagcgctgacggtaatgcggaagattcgaaagccgcggcttcgccggttgcggtcgggtatgccaacccagatgggatcggcatacccgttaccccggattctacggaagatgtggatgtcgtcgtgatgggctcgggcatgggcggcttcacggcggctatgctcaccaaagaacaggatcccgatgcgacggtggtcatgctggagaagcagaatgcgttgggcggcaacaccaatttcgccgaaggcggcgccggatatctcaacatgtcacccgaagaggcgcgagctgcggtccaagccgaaatgatccagcgcaacttcgtcgtcgatccctcgctgttctacgcgcttcgcacgcagcagggggattgcgccgattggctgttcggcaagcatggggttaagatcgaagactacggtagcggccagcctctctacgaaggcggtacaggggcttcggccatcgccaccttgacgcctcaggctcaggagctcggtgttgacatacgtaccgaagcgcgcgctttcgcgcttgtgttggacgatgattacaccgtttcgggtatccagtacaaagcggccgatggcagcgtgattcaactcaacgcaaaggctgtcgtcatcgcttcgggcggcatgaacaccaaccctgagttgctcgacctctactcgaacgtggatttgggcaaggtcatgccgttgggtaccggacaagatggggacgggcatcttatggtggagcagacggcgcatggtcgaaccgggttgcaaaccatcgacggattcttcgccggcatcggtacggccgacgatccgtgcggcttcaactccgatctcaataccgctgcaggatttcagttttcaagcatgttcgtgaaccaatacggcaatcggttctacgacgagtcgttcggtttcaacaccggctcccagctgttcttcacctgtatccctcaggtcatcctatcgcaaagccaggccttttcggtgtttgacgaatcctatattcagaaatgggaagatggacaatggcagaacggccataacggtttcgacagcgctacgaaaacgggcacgccgcttgagattcgttcggaaatcgagagggtgaaggataaagactggttctaccaagccgacacgatcgaaggtcttggagcggcgatcgccgccgatgtggaaagcttcgatgtcgatgcgttcgtcgaaaccgtcgatgcctacaacgccgctgcagatggcgccgcagatgaatacgggaaagcgcaggagttcgtttggccgcttcgaaccgccccgttctatgcggcgaaagctggcgtgaacgcctacaacaccaacggcggaatccatatcaacgcccatgcgcaagtggtggatcccgacggaaaagccattgcgggcctgtacgcttcgggtatcgccactgctggctgggacagccaggtatacggcggcggaaccaatcagccggtggccctttggtgttcctgtgcggcggcgcgccacatcgtggaaaaccgccttggaaagacagttgccgaagactggatgggcgatgtgcccatgacttcgattctcggcgagggctacactaacgccaatcctctcggttaggctatactctggaacgaaatcgcacgaatgcggagcagccgatatttcgcttgccggcgaatcggctgcttcgcggttgatgacgttcggggggaggccgtatgaccgagtgggttcttgaaacggagcgccttgggttgcgcaagctcgccgaaggagatttcgccgatctctgcgccattctgcaagacgagcaggttatgtacgcctacgaacatgcgttttccgatgaagaggttcaaaagtggctcgataatcagctcgggcgatacgatcgagacggcttcgggctttgggcggtgatccttaaagaggggggatcgtttatcggccaatgtggccttaccatgcaggaatacgggggcgagcgcgttgtggaagttggctatctgttcgcgcgggcgtattggcatcgggggtacgcaacggaggcggcgcgggcttgccgcgattacgccttcgcagaactcggcgtcaacgaggtgttttctttgatccgaacgaccaacgaagcctcgaagcgcgttgccgtgcgaaacggcatggtgccgcgaggcgagttctcgaagcactaccacggcatcgatatgcctcacattgcctattcggttacccgcgccgaggcagggctcgtgtagcgccccattttctcatcggggtttcggcatggcgtggatcgcgccgccggcaaacgcctcgaacgcttcgccgatcgcctcttcgaatgtgggatgagggcgtatggcggatttcatctgctcgatcgtgaggccgtttgccacggcgagcgaaagctcgccgatcatatcggttgcgcggccgcacatgagctgggcgccgatgatccggtccgattcgtcggccacgatcttcgcaaagcttctgccctgtccggtgatcaccgatttgccgttgcccgtcatggcgaacttgcccgcacgtgcggcgatgcccgcttgcttcgcctccgcctcggtcattcccacgctggcgatttcgggggaggagtagacgcaggaaggtacgagtgccgggtcgaacgagacatccgctcccgcgatcgtttcgacggcgacgatgccttgggccgatgcggcatgtgcaagttgcgctcccgctgcggcgacgtctccgattgcgtagatgccctcggccgatgtctgcatgcgtttgtcaacggctatgcggcctcggtcgagttcgagttcgaagccttcggcgaaaaggccgccgatcgcgggtgctcttccggtcgcgacgagcacggcatcggcatcgacggtttcggcggcgtcctttacggcgtatcggaccgagagggatccgtcggcggcgcgttcgatggattcgacgagcgcgtttgccacgatggcacagcctcgctttctgtataacatcgcaaggctttggccgaattcgcgatccatggtcggcaggatgcgcggcgcggcttcgagcacggtgacatgggttttgagcgccgcgtagatccccgcgaactccatcccgatgacgccgccgccgactatgacgaggcgtttgagctccgggatggtttcgagcatgtcgtcggaggtgagaaccccatcctccccgatgcccgcgatgggcggcttcgccggggccgatcccgttgcgatgatgaggtggtctgcggagatttcggctatggtgccgtcgggccgggaaaccgtgatgccgtcaagccctgcaaccgtcgccgttccccgcatgagcgtgatgccattggctgcaacgagggcttcgacgccgtctcgaagcgattcgcgcactttggcggtgcgcatgcggagtgcgtcgaaatcgacggcagctgattcgatgcgaataccgagggcttcagcatgggatatctcggagaacagctcggcggtgtggaggatggttttggtggggatgcatccgcggttgaggcacgtgcccccaatgtcgtcgcgttcgactagcaccgtgttgatgccgagttgagcggctctgattgcggcgacgtagccgccggggccggctccgatgattgcgagttcgaagtgttccatgcgattgcgtcctttcggtcgtgctgtgttttgcatcgatgtcaatgcgtgcattatgcgatgcctatcgtgccggtgcgcagtgcgtgccgtgtcagaagtcgctgcggaatagcccgaggcaatccgcgcgcatcgtctgctgtttctccgtttccggctcgagggcctccaggcatttcccgatgccgtctttgtcgtagcggcagccctcgagggaatcggatagccgggcgatgaattcggcatcgagggcatcggagaagatgctggcgtgttcgatctctcctcctttgatggaaagctcgatgtcgaggtttccccaggcgaagcgatcgccgagcgcatggttgaacggcgcggtgtgcccgaaaatccatgcgtgcgaagcgaaccgagcgcacctttgctctatgttgcactcgtcgagccgagcgggatccagcggttttgcaggtgttccgcatgcttccgaaaacgcctcgacgagtgcgatcgagagcgtttcaacggtgacgcgggaattgagcgaggcgaggttcacaacgcgcgagcgaaccgattcgactcccttggcggcgagcttcttcgaatcgggttgcaggtagcgggcaagttttccggtatcgacatcgatcatgagcgttccatggtggcacttcctctcgttcgagcggaagaatgcattgcccgagaacttcgccccatcgacggttgcatcgttgcggcccgatacgcgcgcatcaagtccgaacgactgcacggcggcgcacatgacgttcatatgccgagacacgtcataggcctcgccgcgtgcgacgaaggtgaagttcaggttgcctatatcgtgaaagactgcgccgccccctgaaagccgacgggcgatccttcccccgtcggcttcgaattcggcgatacggcattctttccaggggttctggtttcgccctatgacgatggtgttctcgttctgccagagaaacaggatgcattccccgggcaaagcggcatcgacgagggcttcttcggtggcgatattgcgatacggatcggttgactcgctgatgagaaagcgcggcatcggcgcatggtcgaacgcggagctgcccggcgccgtcgtcgtttcgtcgtggcccgtcatcttttcgcgccgtcgcttccgccgaaatcgcgcgcatcgggcatccagcgcacgacggggttgcgtgctgctcgcacttcgtcgggtcggccgatgcgggtagtcaggggcgcgttatggagcgcttcggcgttgtcgtgcgcttcgtcccaaatcgcaaggaacgcttcggcggctgcatcgagggtttcgcggctttccgtttcggtcggttcgaccatgagcgcttcgtgaacgatgagcgggaagtacatcgtgggcgggtgcatgccgaagtcgaggaaccgtttcgcgacatcgagcgcgcttgcgccggtctcttctttaagcggaccgatgtccatgacgaactcgtgcatgcaaggaccggcaaaggggattgcgtagcggtcttcgagtttgctcatgaggtagttcgcattgaggacggcggtgcgggcggcttcggggatgccgtctttgccgagcgcgaggatgtaggcgagtgctcggatcgccacgccgaagtttccgtagaacgatttcatgcggccgatcgagcgttcggggttgacgagcgcgtatgctccgtcgcgcttttctacgatgggtgcgggcaaaaaatccttcaggtgcgctttgcatccgacggggcccgatccgggaccgccgccgccgtggggtgtcgagaacgttttgtgcaggttcaggtgcacgcagtcgaatcccatgtcgccgggtcgtgcgattcccatgatggggttgaggttcgccccgtcgtagtagcacaggccgcccgcttcgtgcacgatcgagcatatctcgatgatgttgggatcgaacaggccgagcgtgttggggttggtgagcatgagtccggccgtatcgggtccgacggctgccctcagcgcctcaagatcgacgccgccgctttcgttcgaaggcacgttgacggtgtcgaagcccgccatcgaagcggtcgcggggttggttccgtgggcggaatcgggcacgatgatcttggttcgcgcatcgtcgccggccgctttgtgataggcgcgtatgagcaaaaggccggtgaattcaccctgagcccccgctgcgggttgcagggtgactgcgtccatgccggtgatctcggccaggaggtcgcatgccgttgccatggcttcgagtgcgccctgtacggtgccttcgggttgcagggggtgtatgtcggagaatccggggagcgcagagatctcttcgttgatgcgcgggttgtatttcatggtgcatgagccgagcggatagaagccgttgcacacgccgaatgcctcgtctgccaagccgttgtaatggcggtcgagatcgacctccgccacctcgggaagcgcgggcgcctcggctcggcggaatgccgcatcgggcagcgcttcgggcacgtcgcattcgggcagaagggcagaggcgcgtccctgcttcgagagttcgaataccagcttcatctcactgcgctcctaaccatgtcaaccaactcgtcgatctgggttttcgagtttagctcggtagtgcaccacaggatgccgtgctcggttggcaaacctgcaagcactcctcgttcggcgagcccttgctcgagcgcgtgcggatctatcgggcaggaagtcatgaactcgttgaagaacggcgaatcccagacaagctcgaatcctgggatttcggctagacattcggcgaggtagtgggctttcgagcagctgagctcggcggctcgggcaagaccgcggggtcccatgcatgcgaggtaggtgcctgcggccaacgcgcagagcgcttcgttcgagcacacgttcgacgatgctttctcgcgccgaatatgctgttcgcgtgcttgcagggtcaatacgaatgcgcggtttccccttgcgtcttcggtttggccgacgatgcgccccggcagctttcgcatcagctgcttcgtgcagcagatgatgccgaggtacgggccgccgaatgaaagcggcaagccgagcgattgcccttccgcaacgcagatgtcggcgcccatctcgccggggctcgcgaggatgccgagcgagacggggtccgccgacacgatggctttcgcgccggcttcgtgaatcgtcacgatgatctccccggtgttttcgagcacgccgaagtagttgggctgctgaacgatcgcgcacgccgttttgtcgtcgagggcttcggcgagcgcctgcatatcggttgctccgtttctcatgggaaccacgacgacttcgacgtcgcgcccctcgcagtacgtccgcacggtttcgatcgtctgcggattcacggttttcgaaacgacgacggtcgagcgctttcggtcttggcacatgaacaccgcttcggccgccgccgtggcgccgtcgtagagcgatgcgttcgacacgtccatgccggtgagctcgcaaaccatggattggtactcgaatatggattgaaggacgccctggctgatttcggcctggtagggcgtgtacgcggtgacgaactcttctttggcgattacggttttgaccagtgcgggcacgaagcgccgataggcgcctgccccccgaaaaaccgagcggaacacggtgttcttcgctgccatggcgccaaggcggtcgcgaagctcgagctcgctcagcccttccggcagcgcgaggtcgtgcacgcgggcttcggctggcacgacggcatagaggtcgtcaatcgattcgtagccgaggtctgcgagcatctgctctcgctcggtcgaggttgacgggaggtagtttcccatacggcgaaccctttctgaattcttgtttcgaggcgcagcgcgtcaggcgcctgcgaaaacgcaccgcatgcgaccgaaggccgcgctgcgctgcggtcgtatgcgctatttcgagcagagctcttcgtaggcgggggcgtccatcgtagcgacggctatcgttgcgggctcgacgcggatgagccaggcgtcgtaagccgattcgttgatgagcgcggggttgtcgagcagctcctcgttgatttcggttaccgttccgtcaacggggctgatcacctccgagaccgccttgaccgattcgacgtcagcgaacgattcgcctcccgaaacctcgtcaccgggctctggcaggttgacgaacacgagatcgccaagctcgctttgcgcgtactcggtcaacccgacggttgcggtttctccgtcaagtgcgacccattcgtgcgattcggtgtacatgcggtcagctggatggttcatgtcgttcctccttcgggttgccgggtattccggctgctgtcaaaacgtgctgtgaatccggtgcgcatcgggcttttcaccctgcttcgcgatgagcggctttcgcttgtgcgcgagcgctagcgctttcttttgtaaaacggcatgggcacgactttcgccgcgatttttcttccgcgtacttcgacttctatttcgtcgtcgattgcaaccgaacccgcctcgacgagcgccatggcgcaggccttcttcagaaagggacagtacgtgccggaggtggtgttcccgatggctttgccgtttgcgaataccggttcgtgctcgcggacgatgccgcgcccggtcgcctcgatcccgatgcgcatgcgggaaggctcgcctttcgcggcgatggcttccttgccgatgaatgcgggcttgtccatcttcacgccgaaagagaggcccgcctccatcggatcgacggtctcgtccatttcgtggccgtacaaaggcatgctcgcctcgaggcgcagcgtgtcgcgggcgccgagtccgcaggggatcaggccgtcgtcttttcctgcgttgacaagcgctgcccagattgcgggcgcatcgtgcggggtgcagtagatttcgaagccgtcttccccggtgtatcccgtgcgggaaacaaggcaatcgcggccggcaaccgaaacatggggctcgaacgtgtaatacgcatcgggcagcgtcgccctatcggcgatacgggcggtgatcgccgatgcgagcgggccttggacggcgatttgagccacctcgtcggagaggtcgcgcatctcggtgtcatcgagcagatgctctgccatccaggcgatatccttgtccttgttggcggcgttcaccacggccaggaaccgttcgtcgtcgaggcggtacacgatgaggtcgtccgccattccgccgtcttcgtagcagagcgccgtgtagcggcagcgcccgtaggccatgttgctgaagtcgttcgtcatgaggcggttgagggttgcgagcgcgcccgacccctcgaacaggacttctcccatatgggacacgtcgaagattccgcaggcggtgcgcacggcaaggtgctctttcatgaggccggtaggatactcgatgggaagcagatagccggcgaagggcacgatcttgccccctgaggcaatgtggacgtcgtacaggggcgtcttcttttccataagccaaaacctttcaggtcggtgggctgtacgcaaaaaggcgcgctcgggatatgcccccgagcgcgcctctgtctccatacctgaaagatgaaccgtgcgggcgaacccgcgggcttgcttcttcggtgccgatcgaacggctttccagaggtttgtcggattccagtccttttgcctgagagtttctgccccttcggcttccgcgaaagcggatatctcccggaatcgtcatccaaacgctttgtgcgcgatcagaataccacgccggatgcgtgtcgggaagcggttgggtcgcgaacggttcgccattggcaccatcggggagcgggcaaggcgggcggtcgccgcgcgcattgccccgtctttatccgatcttaatgcgagcgccgttaccttaacttcgccctaatgtgcaaggccctaatcttgaaaccggctcgggcacccgtgcgcactggcgcccgacacgcaagtggaaaattggaaaggttggaatgagatggaaacagttgccggaatcatcggcgttctaagcatcgtcgcgatgctttacctgttttacgtgttgttgaaaggcggtgatgagcggtgatggacgaactgctggaatacggcatataccttgccctcctcgttgccttggcgatccctttgagcggatacatcaacaaggtgatggctggcgagaaaacgctgctcggccgcgtgctcgtaccggtcgaaggcgtcgtgtaccgcatgatcggcgtcgaaaagcgcgagaacatgggttggaagcgctatctggtctgcgctctcgcgttttcggcggtctctttgctcgtgctctggatcatcctcatggcgcaaggtgcgcttccgttcaaccccgaagggttgccggggcagacatgggacctcgcgttcaacacggcggtgagcttcgtgacgaacacgaattggcaagcctatagcggcgaaagctcgctcagttacttctcgcaggccataggcctgaccgttcagaacttcgtaactccggccgtcggcatggcggttctgttcgcgctgtttcgcggcatggtcgccgaaagcagcgagggtctgggatcgttctgggtggatgtaacgcgcggcgttctgtatgtgttcatcccgctgtgcctggtcatgtcgattgtaggcatcgcccagggcatgccggagaacctctctgaataccaggaagtcgatctggtggaaccggttggcatcgatgcggacggcaacgccgtttccgccgacgatcccgctgcggtcgacatcgtcgacaagcaggtcgttcccatgggcccgcaggcaagccaggtcatgatcaagcagctcggcaccaacggcggcggctataacggcgtgaactcggcgagtccgcttgagaatccgactccgctcaccaacatcatccagtgcatcgcccttctgctcgtacccgtttcgctgctcttcagcttcggacggttcgtgaacgaccgcaagcagggcagggccgtgttcgctgccgtgttcgtcctgctcgtcgtggcgctcggaatcatcgccttcttcgaacagacgggcacgccccagcttgcgcaaaacggcgcggttctcatgggcacggaaggccagtcgggcggcaatatggagggcaaggaagtccgcttcggcgtaaccgattcgtcgctgtgggctgcgttcacgacggcggcttcgaacggttcggtcaactccatgcacgatagctacaccccgatcggcggcatggttcccatggtgctcatgcagcttggcgaagttatcggcggcggcgtcgggtgcggtctgtattccctgatcggtttcgtgatcctcacggtattcatcgcgggtctcatggttgggcgcacgcccgaatacctcggcaagaagatcgggccgaaagagatgcgcatggcggttatcctgtgcattacaacgccgttcgtcatcctggtcggagctgcggcgatgagccttgacccggcgacggcggcaagcttgaacaaccccggcgcgcacgggttctccgaagtgctctacacggcaacttcgacgggcggcaacaacggatcggcattcgccggcttcaatgcgaatactccgttcatcaacgtggttaccggccttgaaatgctcgtcaaccgtttcgtgccgattgcggcgacgtgcgtgctcgccggaagcctcgcttcgcgcaaaaaggttgcgaccacagctggcacgctttcgacgagcaatgcgatgttcgtcttcctcctcatactgatcatactcctcgtaggcgctctgacgatgtttccggctctcgctttgggccccatagccgaacagcttcagatggtcttgtaaaggtaaggtgcaagggtcaatggcaactgccacattgaaacaatacgatacgaaatctcaggcgcgtcgagccgttcgcgaagcgcttgtgaagctgaaccccaaggatcaggtgaaaaacccggtcatgttcatggtgtttgtctcggcggtccttacgacggctctgtttctgctctcccttttcggcgtatccgatcagcagcccggcttcattttggcgatcgccgtcatcctctggctgaccgtgctgttcgcaaacttcgcggaggcgctggccgaggggcgcggcaaggcgcaggccgattccctgcgcgccgccaagcgcgatgtgcaagcgcacaagatcacccagggcttgcttgcggctggggcgcatgaagacgatcccgttgcgctgtacctggcgcgcgccgaagaggtcaattcagcgacgctcaagaagaaggattacgtcttcgtctgcgcgggcgagcagatacccgcagacggggaggtcgtgcagggcgccgcatcggtagacgagagcgcgatcacgggcgaatcggccccggtcatccgggaatcgggcggcgaccgctcgtcggtcaccggcggcacgacggtgctttcggactggctggtcgtctgcgtcacgcaggaaagcggcaagagcttcctcgaccagatgatctcgatggtagagtcggcctcgcgcaagaagacccccaacgagatcgcgctcgagatcctgctcgttgcgcttacgatcatcttcctgctcgttgcagcatccctgttcacgttcagcggtttttcggcaacccaggcggatatcgcgaaccccacgacgatcacctcgcttgtggcgctgttcgtgtgccttgcgccgaccaccatcggcgccttgctctcggccatcgggatcgcaggcatgagcaggctcaacaaggcgaacgtgctcgccatgagcgggcgcgccgtcgaagccgccggcgacgtggacgtgcttctgctcgacaagaccggaaccatcacgctcggcaaccgccaggcgagcgagttcatccccgtcgacggggcgaccgagaaggagcttgccgatgcggcgcagctcgcgagcctgaccgacgagacgcccgaagggcgcagcatcgtcgtgctcgccaaggagcgcttcaacatccgcgaacgcgaactcgagggttcggggatggtttcgatcccgtttaccgcagcgacccgcatgagcggcgtcgatttcgaagggcacgagatcaggaaaggtgcagccgatgccgttaaggattatgtggagtcgcacggcggcgaatacagcgctgaatgccagagccaagttgaagctatctcccgctcaggcggcactccgctgctcgttgctcgcgatcatcgtattgtgggcgtcgttcatctgaaggacatcgtcaagcagggcatcaaggagaacttcgcgagcctgcgcaagatgggcatcaagaccatcatgatcaccggcgacaacccgatgaccgccgccgcgatcgccgccgaggcgggcgtcgacgacttcctcgccgaggcgacgcccgagtcgaagctcgagaccatccgtcgctaccaggcggaaggccatatggtcgccatgacgggcgacggcaccaacgacgccccggcgctcgcccaggccgacgtggccgtggccatgaacagcggcacgcaggctgccaaggaggcgggcaacatggtcgacctcgactcgtcgcccaccaagctcatcgatgtggtcatgatcggaaagcagctgctcatgacgcgcgggtcgctcacgacgttctcgatcgccaacgacgtggcgaagtacttcgccatcatcccggcgctgttcgctccgctctatccgcagctcgacgctttgaacatcatgcgcttggccaatcctgaaacggcgatcctctcggcgatcatctacaacgcgctcatcatcgtggcgctcattccgcttgcgctcaagggcgtgaagtaccgcgaggcgtcgtcccagagcctgctttcgcgcaacctgctcgtttacggactcggcggcatcatcttgcccttcgtggcgatcaaggccatcgacatgctgctcgtgctttgcgggatggcgtaggcccagaaaggagtgaacaggtaatgaaaagcgcaaaaacatgggggagctcggttattttcttcctcctcatgactttaatcaccggcgcaatatacacggcggtgtgcacgggaatagcgcagctcgcgtttccgtatcaggccaacgcgagcatcatcgaggttgacggcgttaagtacggaagcgagcttgtcggccaggatttcagcgatgaagatcacatgtggggccgcatcatgaatccgaacgcctcgacgttcaccgatgacgagggcaaccccgtcatgtggtacggagcatccaatctgagcccggccagcgaagaattcgaggccgtggttcaggagaggatcgagatgatccgcgaagcccatcccgaaaagggcgacgagcccattccgtccgatctcgtcacctgctctggcagcggattcgatcccgagatatcgcctgctgcagcggaataccaggtcgagcgccttgcgaaaaacaccggcaagagcgaatcggagatccgcgagatcattgagaagtgcacgactggccagcagttcggcatcctcggatacgagcgggtcaacgtgctcaaggtcaacctcatgctcgacgggataatcgagtagccgtggaccgagagatcaagcggctcatcgtgaccatgatgagcatctggccgttcgggtgcattccgctgcacaggccggtcatcctgccgactcggttcggcgccgccgcgaaagcccgcgacggcaaagcgagaaggtaagggggtaagggggcacgccagttcggcgtgccccgattcatctgataacgttaggaggcaagaggccgcatggaatccgagttcgagttcaaacgagacccggatgctattcttcggcagatagccgaagccgaagaggcggaagacgatacccggggcaagctcaagatattcttcggctacgcggccggagtcggaaagacctatgcgatgctcgaagaggcgcacggggtcaagcagaaggggttcgacgtagtcgccggctacatcgaaccccacacgagggcggagaccatggctctcacggacggtctcgagaagattcccccgctcgaattggatcacaagggcataacgctcaaagaattcaacctcgacgcggcgctcgcgcggaagccccagatcatcctcgtggacgagcttgcgcacaccaacgcgcccggcagcaggcaccgcaagcgctatcaagatatcgaggagctgctgcgtgcgggcatcaacgtgttcactacggtgaacgttcagcacctcgaagggctcaacgacaagatcgcctcgatcacgcatgtcagcgtagccgagcgcatacccgattacgtcttcgacaaagcatcgtcggtcgaactcatcgatatcgagcccgacgatttgatcgagcggctcgaagcggggaagatataccttccggagcgagcgggaacggccctcaagaacttcttcaccaagaaaaacctcgccgccttgcgcgaggttgctctcaggcgcatggcagaccggatgtcgagaaacgccgatgtgtcggaccctttctcgcgcattgaagtttccgaagacgtgctcgtctacgttaccgatgatccaggaaacgtgaaggtgatacggacggccgcgaacatggcggaatcattccatgggtcgctgacggcccttgtcgtcgagacggccgagagcaggaaaaaggagcagaaggccgtctcgcagctgaaaagcaatatcgagttggcagaagagctcggcgctcacgtcgtcaccatgcacggcgacgacatagcctttcagatcgcgcagtactcgatgacggcaggcatcacgcagcttgtaataggggtatcggaaagccggcgccggttgctgcggccgagcgaagatctcgtgagcaggctcacgaggctgtcccatagcgccgttgtcaatgtcgtgcccgtgaaggactaccccgtgcagcgggggcggagtgtttctgcttcgggtctcaagcttactgcgggagatgtttggaaggcccttgcggctatagccgtcgcaacggctgcgggatgcctgatatacgagatgggtttggcatcgtcggtgatcctgatgctctacatgctcgtggtcatgctgttcgcggtgaaggccgacgggttcttctatgggatcatagccgcattgggcagcatgctcgcctacaacttcttcttcacgatgccgcgcttcacgttcaacgcttacggcatcaactatccgttcatcttcgtgttcatggtgctgacgacgctggtggcatcgtcgctgacgatacgtctgaaaagacagagcgaggccggcgccaggcgcgcgtaccgaacggagatccttctcgaaagcagccggaagcttcaagcgacttctggcgttgcggagtgcttcaacgtaacggcgggccagatcatcaagcttctgaaccgcccggttgtcatgtaccagatggcgccggcgggaggaaggctcgaggagcccgagattttcgacgttcccggaacgttcggcgacggctccgtgcgggcgttggtgtcttcggaggaaaaggcggttgccgcttgggttgcggccaacaacgagcgcgcgggcgccacgaccgatactctgctcgatgcgagatgcctttatctgccgatacgcggaaaggagggcgtcttcggcgtggtcgggctggcgctcgagaaggacgacgaggagttcgggccgttcgaaaagaacatgctgctcatgatcgtcgacgaatgcgggcaggtcgcagagcaacttgcttcggcgcgcgagcgagcggatttgaagctgaagatggagaaggaggagttgcggtcgaacctgctgaggataatatcccacgatctcaggacgccgctcacgagcatatcgggtgatgcggatattctgctcagcaacgccgacaggctgtccgatgagaagaagcgccagatgtaccgcgacatctacgaagactccacgtggctcatttccctggtcgagaaccttctcgccatcacccgtgtcgacgatggcacggtgaagatcgattccaagcccgagatgctcgacgatatcatccaaggggcgttgcagcatgttaataggaaagtgaagagccatcgcgttaaggtcgagcttgccgacgaattgcttatggtcagcgcggacgctcgtcttgtcatgcaggtcatcgtgaaccttgtgaataatgccgtcgactacacgccggagggctcgacgataacgatcgtcgcctcgccggtcttcgataaggggaaaagaaaggcgaggatctccgtttccgacgacggccctgggatttcggacaaggataaagcccatatcttcgacatgttctataacggctcgtcggaaaagcaggtaagcggagattacaggcgtggcctgggtctggggttgtctttatgccgctccattgtgcgcgtgcacggtgaagacatcgaggttcgcgatgccgaacccagcggctgcacgttttcgttcacattgcccatcgtcgacgcctcgagcatagagtcgctcgaggatcggcaggatgctcccaagggcggctcatcggataatcgtgagggggatcagtggacctgaagcataaaatactcgttgtcgaggacgattcggctgttaggaacttggtttcgaccgcgctggatctacacggctacctgcataaacaagtaggaaccggcgcgatggccctcttggaactgtcgaccaaccgctacgatctcttgctgctcgatttgggcttgcccgatatggacggtacggatatcatcgggaagcttcgcggatggtcgaacatacccattatcgtcttatcagcgcgccttgaggacaaagacaagatcgaggcgctcgatgcgggggcagacgactaccttgtgaagcccttttctgtcgacgagctgctggcgcggcttcgggtgtggcttcgcagggttcgccagataggggagctcgaggatggggatccggcggaatacgcaaacggtgacctgcggatcgactacctcaagcagattgcgacgttgaggggagaagagctccatctgacgccctatgagtacaagctgctgtgccttttcgcgaagaacaccggaaaggtgctgacccatacctatattctcaagagcatttggggtaacgaatcggagtctgccgtttcttcgctgcgcgtgttcatggtttcgctgcgccgcaagatcgagagcgacccagccaaccccgcctacatcaagacccatgtcggcgtcggctaccggatgatgcaggcaggcgacgattccgcatccgacgttcgcgcttcgaagcgctagcgaaaggccgttgagcgcccatgtggcagagcttcacattgcacgagctgagaatagtcgtccattatctcggctccctcatccagctcctttcgtgcatgatgttggtgccttgcgcgatcggggctttgtttggcgaatgggagcctgctgcccgctacctcctgtcgctgggcgcctccttgacgctcggctcggcattgaggctgttctgcattcagccaccgaggttgaaccgtcagcaagcgctgtgcataacggggctcgcctggatcgtgctcgcggcggtggcggccgtgccgctgcacttctcggggcattacgcgggatacctcgatgccctgttcgaaagcgtatcgggcttcaccacgaccggggtcacggtgacccaggatctcaaccacctctcctacgcggacaacacgtggcggttcgtcactcagctcatcggcggcttgggccttatcgtcgtggcgctctccctcggattgttcggcagaagggtcgacgcgagcctctattcgtcggaggggagaagcgagcgggttctgccgagcgtgatagagacgacgaggttcatcatccgggccacgtctctgatcgtgttcgccgccgcgttcgtgctcgcggcgctgtgcttgcttctggggatggatcccctgcgaagcctcctgcatgggatgtggttgtcgatcgcgggtttcgcgacgggcggattcgcgccgatgagcagcagcatgatgtactacaactccgtggctatggaggtcgtgctcatggttctcatgatcttcggatcgatcaatttcatcttgtttgccgaggttcgcaaagatcgcatgggaacgtttttccgcgatgtcgagatcaggacgatgttcgtttgggttacggccatggtcgtggttcttatcgtttcgctgtgcgcaagcaaggcatgcgacgacacggggtttctgttgcgcagggggctctttaccgtcgtgtcgacgttcagcacgtctggattccaggtgctgaccaccaatcagatgatgaccatcgtgccttccggcgccctgctcgtgttggcgcttctcatggccgtgggcggcagtgcgggcagcacgtcaggcggtatcaagctggcgcggatcggcataatatcgcgatcggtgctggcttctttcaaagaggctttggctcccgattcgtctcggatcgttgtggagtacaggcatctgggcagaaggcgcctttctcctgaggtggtgaaagaggcgatgatgattttcatcctattcgtcgccgtatgcaccatcggggccattgcgggtgttgcgtatggatacgatgcagttgccgcgatcatcgagtccgttgtcatgaccagcaacgggggagtaagctcggggatcgcgtcgcccgaaatgccgaccggtcttcaggtcgtctacattctgcagatgtgggcgggtcgcctggagttcgtcacgcttgccgctctcctgataaaaatcgccgtgtctttcaagccgaagcgaaagcccgttcccctttcggaactcgagagcctcgaatacagggggttgtcagccaagaacgatgaggggcgtgcccgctgcgagcgcgatgccgaatagcacgttttcggggtcgtttcggacagtgcgatttatggacggatcgtgcttctggcattaacaacccataaaacctgttcaaactatctttttgagtctttttccttcaaatagaatcagaaatgcaagtgcgaatcgcttgtttaagaagaaagaaggaacgaagagatggcaaagagaatgttcaaggattccagtgggcactccgcaatgataacggagcgtcccaacggcacggcaacgctgaagatgttgtcgggcggaaaacggaccgagagggagtacggcagtttccgagatgctcattcagccatgaaacgcctgggaaacgggtggaaagaacagtaaagccccttgcggctcgaaaacgaaacgtcgagtcgaggcaaaagggctggattcgggagcttcggctccggggtccagccctttttcgtccgatgggatctgccgagcatcggcaatcgtagcccttgtttgcttcggggagcactttgcgtcgccggcgattccgccttccatgcgtttacgccgctcatgcgggtcgctgcggcatcgtgggtgtgcgggatcccacgcgtgctaccgctgccacggtggaccgtagtgccaatcgatatcgtttttcgacgagaggaacaagcaaagcaggatcaccgcgcatatggcggatactattccgatcgaacagccgatcgcatgcaatatgcccatagcgttctccttccaatctgcattaaaggttagcaggcccgctatgaagaggggattaatctttaggtttggcgattaaggatgcattaaggttggcggattctgcggctgcctgcattgccaacattaacgccgtctttatgctggatatggtttaattgtttccgccatagccgttgtgatgtagcccaggttttgcgacgaacctgtgcgggctgttcgatccgatcgcccgttatgacggcaggctgaatgcggatgcccgtttaaaattctcatgaccccaatccgacatcatgatgcaatcgcgggcatccgcccattgcttggcaaagcaagatgtcgacgcaggcgcccctactcggctggttcgcaccagtgggtgccggcgtcggcgggcgattctcgagcgcaacggcctgagaatcgccgaaacggctcgcgcgggcggcttccatgcgaggcgccggtcatcgaagcgccgttaagtcaaggctgtgcgacagccgtttccaacaaaaaaacgcccgtgcgggcgttatcgttttgtggcggaggaagtaggatttgaacccacgaacgcgtgaacgttaacagttttcaagactgccgccttcaaccactcggccattcctccgtgttgccattggcttccgattccctcgtttgcggtgcgtctcccgaaagggcttcgcgccgatgctccgttggtatcggattgccaaagcacgtgcaaaggatgttaacggattggcggtcgaatggcaacgttccgcaaggtttttgccccgaagaaatacccgatcggatgtttctttctcggttcgtacgcgtggtttaagattcaagtgaaattgaataaggcggccttgacctctaattataaccttattgattacgtttgcagtaaggtagaatttaagataagctgctcggatatatatctgattggcatcgaatttgcagaattagaggtgtggtatgttcgagcgtgtaaggaaagggaagcacgcaggcggcgcgaagccgaacgccaagcgacgggcgttttctttcgttgttgcggctgtggttgccttgtcgctgtgcccgatattggcacaagcgggtgagagtgacgggggggggagcttactgctgatctcttcggcggcgtagtcgccctgtttgggatcggaggcgacgatgctcgagccgctggcagcgaagagaccgtcgtagacgattccacgctttcgtcgtggcgggagtatctgaccgatgaaagcggcaactatacgaccgagaacatcggtcgtgtctggactgataagaccgtccaagatgaggatatcacgctcagcccaacgccgatcactgtctcgaaaggcgattcggattttcttgtggccctttcggccctctcttctacctcgaacatgacaaccgtttcggataagccgctcgatatcgtgctggtgctcgatacatcgggaagcatggccgaaggctttggggacggagaatcggtttatcgtcctgcctacaacattacgaccagccttatcggcggagaaacgtattatgcaaaagttggagacgactaccagcggatcgaagcggagcgcggcgggctgttcgagggatttgaattcaagtactggaagcttgacggcgaacgggtagagccgaaaacgagcgaggatgacgccgatccgaatcacatccaattctacacgtacgggcagctgacgaagctcaatgcgctccaggatgccgccgccggtttcatcgatgcaacggcggagcagaactcgcagatcgtcgatcccgataagaagcacagcgtatcgatcgtgtcctacgcatcgggcagcactgttcgccagcagctgactgcatgcgagggcgctgccgcgcaaaccatgaaaaacgccgtaaaccgcctgagcgcaaacggcgcgacctatgccgacgacggtatggaatcggcccaaagcgtgcttaccggcaacgatgctcgcagcgatgcgcagaaagtcgttattttcttcaccgacggcgagccgaaccaccaaaacgggttcgacggatccgttgccaacgatgccattgctacggcgggtgcgctcaaggcgtcggatacgtttgtctatacgatcggcgtcatgcagggagccgatcccggtgatactcgcgagaatttcaacgcgtacatgaacggcatgtcgagcaattatccaaacgcgcaaagttacacgaatctcggccagcgtgccgagggcgattattacaaagccgctaccgatgccgacgaactcaacaccattttccaggaaatatcacaggagattcagcaggcggcaacggggtcgccgaccgaggtcgggggagaggatcccgcgaagagcggctacatcaccttcaccgatcaacttggcgattacatgcaggttgatgatttcaagaccattgtctatgccgacaatcgcttcgacaatccgacgaaaaccacgagtgacgatcgatcgaccgatacctacgtcttttcgggcaaggtcgatgggaacaacctgtacgacgaaggcgatatgtcgcatctcgtcataaccgttgtccacggcgacggggcggcgggcgatcgcgtgaccgttcagattcctgcagagctcatccccctgcgcaacttccaagtttcggaaaaagacggcgtcatgtcgatggacgtgacggaggcctaccccattcgcgtgttctacggcgtcagcctgaaagacgaagcggggcagatgcttgaaaaccccgacgaggcgatgcgggagtaccttacggcttaccaggcgggcgacggcaaggttgccttctactccaacgcatatacggcgggtgaggcggacggcgataccgtttccgagttcgagccggccgacacgaacgatttctactacttcaccgccgataccttgcttctccacgaagacggttcgcctgtttcttacggagaggaaatacgcccctatacggtttacaagtacgagcgcgcgttctatgttgagaactccgatggaacggttgagttgaaaacgtccgaaacgaagctcgtcggcgaatcaagtcatacgatccttgcgaacagccttaagcgcggaagcgatggcaacgcctatatcgaggcggggacaccgcgtttgacgcgcatcaatgattttacgagcacgtcgaaggcgtccaacaaaaccggtacggcagaaaacgttatcaatccgacgtgggcagaaggcgatgagttcatcgatttcaatcacatcgacgtgcgcttgggcaacaacggcaagctcgcggtcgagcagcccggtacgcttgccgtcaccaagacggctacggtggcagggggctatacgggaccagccgatcttgcagacgtcgattttgccttcgacatttcgattcccaatgctgcgaaccgagaattgaacgccgaggttcgaaatgccgaaggagcggtggtctccgatcccgattggaagcttgccttcgattcgcaggggaaagtctcccactccctgaaaaacggcgagacgctcttcgtgttcggcctttccgccggggattcctataccgtcgccgaatccgccgatgcgatgccggacgggttcgcgcagaagtccgcaacgggcgatgcgggcacgatcgcggcgggcgaaaccgcgatcgcttcgtttgccaacgagtactccgcccaggcaacgactgtttccggcgatgcgtttcaggcgcgcaaagatatcaacgattggcccgctggcgccagcttcgagttccgtcttacggcgcttgctgcgagcgccccgcttccccagggtcttacggggggtaccgacgataacggcaatgcgtatgtgtcgaaaagcgtttccgatggggcggtgttcagcttcggcgatgttgagttctcgaagcccggccagtacgcgtaccttatcaccgaaagaacgcccgacgaagccgatagggagctcggcgtatcgtattccgatgccgtgtaccgcatcgacgtgaccgtgaccgatgacggcgcgggaaaacttagcgcggcgtacgagatgaagaacacctacgacacgagtggtcttcccatcgccgatcctccggttatcagcgacaacatcgccgtgatcacgaaccagtaccatctcgattcgactaagatcggcccgctcggcgataaggtctataccgacaacggtgacaacggcctgacgatgggcatgttcagcttcaagatcaagcctttgacggcgaacgcgccgataccgactgatggtgccggcgatccgctggttcaagagggcgaatactactacacgacgaatgccggcgacggaagcattgcgttcggccagatagagttcacccaacagcatgaaggggaaacctacgtctacgagatctccgaagacatccccgaggccgccacggctgacaacggctataccgttgcgggcatgaaatacgatccgcgagtctactatgcccatgtatcggtatccaaggaaaccgctgcgggtggtgcggctgtcaaggccacgatcgtttaccgtgaatcggccgagttggattctgccatcgtcgatgttccgaacaaccgcatgaagttcgaaaattcctatacgcccgatccggcaaagctggaaggcgagaacgccattcaggggcagaagatcttgagcggccgagattggagcaatgatgaattcgagtttgcgctgacggctgctaacgaggccgccgtggacgggctcgccgccgatacggtggttttcggcggcgacgcggccgctgagcagctgacggctcgcgccaccgatgcctcgcatgacttcggcttcggctcgatcgaattcgcagagcccggcgtgtatgctttcaacgtgaacgaagtcggaatgcccgacgatggcagtggaggcctgacgtacgatcggcataccgctacggtcacggtgacggttaccgatgacaagcagggacaccttcaggcgtccgtctcgtacgacaactcgcgtgcgacaaccgatgccgataaggccgagacgggcgctgcggcgttcacgaacgtctattccgcatcgatcgattacggtgccgcaggtgggctgagcgtatcgaagatcctctcgggacgcgatatgaaagcttcggaattcggctttaccatagagggcgccgacgatgcttccgaggcgaagcttgcgcaaagcgataggtcgtttggcaacggagccgctcgagatggcatcgccagcgtgatgaagaagctctccggcttgaggttcacgcaggcggaggcggggaacacctacgctttcatcgtcgatgaggcggacggtgccgcagtcgacaacggcataacctacgacaaatcccagtaccgcgttgcaatcgaggtattcgacgatggcgacggaaccatgcacgccgtgacgacggtgaaaagaaccatggccgccgatggtcaggcggccgacgagttgatcggcacctacaatagcgataacagtgcgactgaaggctcgcctctcgttgagttcggtaacgcttatgcgccggaatccgtagaggtggatgtgtccgcacacgccaagctgtacaagattcttgatgggcgggcatggcttgcggaagattcgttctcgttcgatatcgaaaaggcttccgtagacggtgcgacgtcgggagatgcattcgatgcgatgccctcgttcgatcaaccccgcgtcacgctctccggcgccgatttcgccggtacggaaagcggggaatcggttgagttcggattcgggtccgtcacattcggcaaggccggcacgtatgtgtatcaggtgaccgaagataaggcgggcaccgttgaaaacggcatctcgtactcttcgaacatcgccaccgtaaccatcgtcatagccgatcccggcgacggacatctggttcttgagcgcgtgcgtgtcggaaacgatacgtttaccaatacgtataagagcgaattgaactatcctggcgccgttgaccttgcggtaaccaaaacccttgacggccatgcccttgaagaggatcaattccagttcagggtgaaaggccagggtttgcccgacgagggaatcgtcttcggcaacagcgctcctgatgccgacggaacggcgacgatgaagttgcccgatacgtttttgcactttacccagcaagattcgggcaacactttcgtgctcgagttcgccgagatgggggccgacggtcagccgggcacgggtggcgagcagggtggatacgtctacgatgccaccgtccattccgttgagataacgccgatcgacaacggtaacggcacaatgagcgcatcgacgaacgtggtaacgaagaaggcggacggaaccacaacggagcaggctttcgagtggaagcccggtgacgccgatgttgcggtaacgcttccatttgccaatagctacagcgctgaaagcgtctacgatgccgctgcgtccatcgatgcgaccaagacgcttgcgggccgcgatatgcgggccgacgagttctccttcgaggttgtgacgcgcgcggttgacggagcgcaaggatttaccgaacaggttgcggctcggggcggcaacgcttcggccgataggggccagccggggtctgtgacgtttgcaagcgtcgatgatgccatgatctacgacgccgagaagctggacgcggccgtgggatcgtatgcaaccaaggagatcgtcgagggcaagcagacctggacgctcaactatacggcgcgcgagctggtggggaccgacgatctgccggccggcgtgacggcggttgccggcaagacgtctttcgatttcaccgttgtggtgaccgatcaaaacgacggaacgctttcggtttcagtcgagtaccccgatggcgccattgcttttgaaaacgagtacgccgccaccatgcccgacgataagaaggttgcaaccgacgccctgttcagcaaggtgctcgatggtcgtgcctggaacgattcggatgccttcgcattcgagctgaccgccgttaccccgggtgcgccgatgcctgatgggcaaacgggcgagacgacgctcgaagacctcggcggaaccgaagaaggccaagccgtaccgttcgggttcggcacgatcggcttcgccgccgacgatatggacggtcaggaaaccaaggatttcgtgtacgaagtgaccgaggtcgatcctggggagggcaaccgcatccccggcgttacctacagcgccaacaaggcaacgcttaccgttacggtgaccgatgacggcgaaggaaccttgagcgccgtggccaaagtcgagaacgctacgtttatcaattcgtacgaatcttcggtcgactactcggcgcttggcggcttgcggatatcgaaaacgctcaacggtcgcgatatggaaaaggatctgttctccttcaccgtcaaggctcttgatacgcaagatggtccgacggccgccgaggcggcggagaagctcggtatcgccgaaggtgggagcacctacaaaaacgggttcgccgcccaaggggacgccttcgttatcgatctgctgggcaaaggcgtcgaattcacgcaggaagatgatgggaagacgtacacctacgaggtggtggaggtcaacggcggcaaactcgggtacacctacgacgatgctccccgcacggttaccattgctgtttccgacaacggcgatgctacgcttaccgtgacgaccgtggtggaaaagggcggccaggaggttgaccggcaggttgtcaccacgggagaagccgttgcgaggccggcaacggtcgagctggtgaacgagtacaacgatgtgcccgttatcgtggggcaaggcggcgttgccatcaatgcgatcaagcagctggcgaaccattcgcttgacgggtaccagttctcgttcaacgtgatcgacgcgaagggcggcatcgttacgtcgggcatgagcgatccgagcggagccatcaacttcaaccccgtcgagtacaccaccgatcggttgaatgccgatgtggcggcgggcctcgcaaccgaaacgaaggacggcacggtttacacctatacctacgactacacggtcagcgaagacacgggaagccttcctgcgggcatctcgggcgttgcgacttcgttcaggatccaggtttcggtgatcgatgacggaaccggaagcttggaggccgctgtaacgtatcctgccgattcgggcgatcagctcgtcttcgaaaacgtgtacggcaccgatggaagggcttctgtcgatattgcgggcggtaaaacctacaaggtggaatcgggcgatgacgcgccgagcatcgttggggagtacaccttcgaaatcgaaagctccgatggcgcacccttgcccgcgaaaacgacagcgaacaacgatgcttccggcatggtgagcttcggagaaatcgtctacaccatggaaaacgtgttcggggagaccggctcggcactggcttcggacggtgcagccgcgcaaagcgccgagcgctccaaggcgtttacctatacggtgagggagtcaggcgacgtaccgggcgtgagcaacgatcccgaagctgcgaagaccttctccgttacggtgaccgatcacggcgacggtacgctttcggccgaagcatcgcggctgccgaacggattgaacttcgagttcgtcaacacgtacagcgtcgatcctctcagctttgatgcgtcggccgatatcgatgcacgcaaggtgctcgaaggccgtgcgctcaatgctggcgagttcgagttcgagcttgtcgatggcgataccgtggtctctctcggcaaaaacgatgcagaaggcgccatctctttcgagccgattacctacacggagccgggcacgtatacctaccaagtgcgcgaaaaagacaatgcgctgagcgggatcgaatacgacaagtcggtattcgcggtgaccgtcgttgttgaagacaacggcgatgcgacgatgtctgcggatgcgatggtcgatggcggcggtgagatcgtctttgagaatttctacgaggctgcgcctacatcggcggcgctcggcgcttcgaaggttctcgaaggaagggatttggctgatggggagttctcgttcagcctcatcgatgcttccggcacggttctcgaggaagcttccaacgacgccgatggccagatagcgttttcgccgatcgcgttcgacgaagccggcacctaccggtttacggtagaggaggtgctgcccgaagatgatgacggagcgcttgacggcgttcagcacgatggggtgacctacgacgatacctcgttcggcataaccgtgacggttgtcgatagcggtcgcggcgtcttggaagcctcggttgcatacgatgccggtgctccgatgttcgccaacgttttcagcgacgcgaaaccgcttccgggccccgctcctgattccgacagctccgctatcgtcagtacaggcgacggcgcacttgggataatcggcggcttggcggccctgtcggcaacagctgttgccgttgcgggcttcgccttggtgcgaacgagaaagaacagaggcgggcttcatcgctaggagcgcgtttcgacgagggttccggcaagctgttcgctgaaggaggagtccccgatggcccaggcggttatcggggactcagcgtctgagtccctctgcctcgattcgcccgatggagaattcggcccaggagtatgcgggaaggtagtcgtggcggtattcgttcacggcgatcggatcgcctgcgagaaatcggtagaggtcgcagtcaactgcttcggggttgatggccaggctgttccagcttttgaccaggacatcttctgcacccgccgccgcaagcgcggcacgcagatcggccacggctgtttggtagtagctgcgctgggtggctccatagggctcgtcctcccaaagcgccgcacatgcctcgcgactcgatatgcccgctccgcggcgatcgatcaaaagcgccatcagctcctttgctttcgaacgcttgaacgcgagcggcttgccgtcgactttcacttcgaagccgccgaaggtgcgcgcctgtatgcgcgcatgggcgtgcgggtgccgttcgtagatgaaggtgagctcgcggcgaagttcttccgcgtcgacgggcttgagcaggtatcccgttgcgtggagggcgaaagcgtcgagtgcgtaattctcgaagctcgtcacgaatacgatgtggacttcgggatgcaggtctttgaggcttttggcgaaggcgaggccgtttatacccggcatctcgatatcacagaacgcgacgtcgatcgtatgcgatcgggcgtaatcgagggcttcgacgggggagaggaagctctgaaggctgcaatcgtccacctcggcttcgatcgctcgggtgagatcgccgagtgcgagtggctcgtcatcgacggccatcatgcgcaggttagtcatggaatgctcccgtcaacggtatgatgatatgggcgacggttcctttgcccgggttgctggtgatgcgcagcgagccgttgcaggttgcggcaaggcgcgtgcgcacgttggcgatccccacatgctgtctctcgctttggccgggcacgaacgtgccgttgccgaggaagacatccgtgtcctgctcgtggtcaagagcgaagcccacgccgtcgtcctctacggttacaacgtaggagttcgggagtttcgttgtggagatgcggatggtgccgccttcggtacgtttggttacgccgtgccggaccgcattttctgcgagcggttgcacgacgagcggcggcagggagaaatctgtggggccgatggcgtactccacgcgcagtcgatcgccgaagcgccgctgttcgagttcgagatacgtctgcacgtggcgaagctcgcgttcgaagggaatggggtttttactggtgagcgatgccatgttttcccgcaggaaccgcgaaaagctcgtgaccgcacgggccgcttcggtcgaatcggttaggcagagctctcggatggcggtaagcgtgttgtagaggaagtgcggctgtatttgactcagcatgatgtcgccgcgcgcttcggcaagctgacggctgcgctcggcgagttcggcgcgatgtgcggcttggatgttcatgaacacgatggttgtggcaagggcaacggcggtgttcatgagcgcaaggccgaagatggcgacctgtgctgcttcggcaataaggggcagaaaaacgtatacggagaaggaaaggagctccttggtgctcagatgggatcgatagcgaaaaacgatccatgcgttgcgtgcgtgaagcacgataggtatcacctgtccgaaccagaaccaatcgccgcgcacgtatcctgcttccggcgtgacgctgaagaacatgccgttgacgagcgaggcgacgcatcccgcaaggtagacgatgaacagcgccgcggaaaatcgcagatagccggcgggtaccgtggttcgccgccgcagaaacgaaacgatgtagcccgtgaagcataaaaacatgggagcgggcatgacccagaagataaagtttccgatcgtgagaacggaaacttcgactgcgtcgagcggcggtgcccacagccatgtcgtcatgtcgccgattgccatgacgacgttcgcaaagcagattcccgcaaagcattggtttacccgatcgcgccggttatcgacgagcagcacgtaaatcgccatcatcgcgcagaggacggcgctgtatccgtcaagcgtgaggttgagcagctccatgccctgcatcgcaatccatccttgtcgtagtttttcgctcctgacgtagcgccgacatgatagggaagtaggtgcaacaagaatacaacaaatgcaaacgaaaagcccctggcgcatcgctgagcgcgccaggggctgggttcgtacccgagcctttgctcggtacctgtttatcggttcatgcggcgtcgcacgaggagcgctgcgattcccgccagtgcggctaggcctgcgccagccagtgcgaacgcggccaaagaagcggtgtcgtcgccggttttggccaggtcgtaggttttgtttgcgtcgggcgtgtcgaggtcggtcggaccgccggtttggccgccttccttttcgacaagcccttcgatggcaagcttgagatcggctgccgcttcatccacggctgcctgctcgtcgatggtggggttggattcgagcagcgcttgtgcgcgcaggtaggcctggtagaaaacctcagccgattcttcggtgtacttcgacatgtctacggcgcgcgcctgctcgtaccagtaccgcaggccttcggtgtcggcggcatctcctgcggcctcgttcgtttccgcacctgttgccacgaacgcgtagccgttgttctcggttgatccctgaagcttcgaaagcacatagaacgtgcctttgtaggcgagtgcggacggtgcgagaagagccagatcggacgcgcgcttatcgaatgcggtggcggcatttgcaagcgtgcttccgagaacgtaggtatcggctgaaccgtcgtcgctttcggggccgacgagcatgaagccgcctttgatcgcgcccgacgccacgggctgggcgcccgattcggtgtagagccgcgagaaatcgagcacggtttcctccatgtttccgtcggcatcgatttcgatgcactcggcacctgattgcagcgcaccctggtcattcgagttgtagccgctcgatacgaggaacatgccgtcgctgtagctgacttcgggcgagaacgcggtacgcgaaaggtcgccgagatactcccattcgctcgcgccatcgaagcggagaaccgacaaggtgtctccgttgtcttcggagccgccgaacgagtacaggtacgtgccgtcgcttgcgagcgtgccgtacgaggcccattccgtagttgcatcgtccgatgccgcccagatgcagttccatgctccgctctgatcgagcgtccacagcgcttctttttcgcctgcaacgagtagggcaagcttgccgtcgtatggcgtggcggacatgccgtgcaccccatctgtcccagggttgaccgaatcgatcacctcttggggcagatcgatggtggtccaggaatcgtcatcgatgctgtagcgctcgaacgacggatatatttcgttcatgcggaacatgctgacctgcggcatggcgtagatatcgccgttgtagccgacgagtcgcgccttgtcccacttttcgatcgcgtgggggagggcgaggtttttctcgtagtaggttgcggtttcgctgcgtccgagcacggggaactcgcgggcgtattcgccggtgtcggtgttgcgcacgcgaacttccacctggcctcccgtgaaatcgctcgggagctcggcggtgataaccatctggccgccttcgcccgagtcgactttcgtgacgacggcgggcgatccgtcgactgctacctcgagcttatcgatatcgtggaaccaatatccccagattaaaattgattttccatcttgggaacgctcgatttccgtgatggcaggtccgggattgtcgatgcccttctgcacgtcgatcgtgccgttggaaaggcagagtccttcttcgaggtttgccgaggggcttgcggcggcgcgcacgcgtgcggcaagctcgatgccgcgcgaggtgctgttctcggcgatcacggcggcagcgccggttacctcgggggctgccatcgaggtgccctgggtgtaggcgtagggcacggtcgttgagccgatgcctatggaatcgatgaggacactttccccaatggggctgatcaggcgctgaccggcagtcatatcgacgtccatgcaggtacccgtgattatgagctggaagttctcgtagtcgatctcgcgctcgacgccgtctgcgccgacgacgctgtcgggaagcttgaaggtcatgcctccccagcttccgtcgactgccatgaaggagttggcaacctgcgagagcatggcggcctgcttgcccgccccgccgtctttggtgaatactccgatcgagatttgagccgagcgatccttccccttttcgaagggggtggcgaatcgaatgctcaaatactcggcactgcctgcttcgcgagcggcgctgatgttgatcgcatcgctcatgaccatctgggttacggggttgcccaccgcgttggtatcgccagtgtattcgagcatgaggctcgtatcgccgtcgaaagagcgctcgtcggtcgtcgacgccgggtcgctcggctgctcgtaggatccgtcgggcctttgcttgcataccttgaaattgaggtcgactcccgtggctgcatcgctttgcgaatcgaagctctcgtagagcgttggcgctgaatcgagttcgccgttgtagacctgctgtgaaacgggataggtcgagaggctcgttgatccgggggcggcgaggtcggtggtcttttcgccgtagttgctgtacaacgagatgtctccgttcgcgtcgatcgagttgacctcgatcacgtaggggttttcggaaaggagcgatcccgagtaaaaggtcttgtcgacatcggtgtgggaattgccggttgcaaagatcgagatagcgcccttctggtccttcttggcgcctaagcccacttcagtgatggcggtgtcgacgatggtggacgcgccgccgccgatggcgaacgagcagttgatggctacgagcggaacgcctgcgttctgggcggctgctgcgtaggcgaagcatgcgacgatgctgagggtgtcgtcgtggtgcctgagcgccatgatgcgcgcgttctgggatacgcccgacgtgccttcgccgttccactccgcggcgatgatgccggcaacgtgcgtgccgtgggcgctgtcgctggcggcaacggtcgtgctgttgcttgctttggcggaaaacccgtgcgcatcgccgccgggatagtttgcgagctcggggtaggcgctgctatcccagagtttgttttcgaggtcggggttgctgccgtcgacgccggagtcgagcacggcgatgatcgggccagagctgccaacgccggcttgctggttccaggcggggtagttgatgtcttcgcctgcgtaggcgcttccggccagtcggccgtcgttgcgtttgccccattggaactctgtggcgtcgacgacgctgcctaccgcgcgcacggcggcctccgggacgggggtatcggcggcgtcggcggcaagcggcgcgatcctgttggcggggccgatgttgttcgaattcgcgtcgtcggaggagccttcgtcggtggttgccgaaccgccgttgggattggtcattgcgccggcgccgccttcgccggtgttgcccgatgccgtgttgccggccttcccatccaggttgatttcgggcgaattgcccaggccggtcgttgtgtcgacggcatcgtcgccggcgccggcgttgtcggcgctctccacgaggtagttgggctcggccgcgagaacgccttcggttgcaagcagctcttcgatcagctgctcggtgcttttcgattcgtcgcgcacgcagatgatgacggcggacggtgtgcttgcttcatcatctgcggagaacgtgctgatttccgcggaagcgtttctcatctcggcgggtgcgtctgccttgccggcaacctccgcaacggcttcggatgaaacatccatgaccgtttcggcgcttgagagcatgctcatagcatcgttggtgggcgcggcaatgtccgaccgcacaagagcgagtgcctcgtgttcgatatagtcgccctggttgagcatttctcgaatgcgttctggctgggtggctgctgtgctatcggcacttggcgtcgtgtcgccgagcgctacgatgggcgtctggcccgccgcgagaacaagcgagagccccaagcagatggcgattcgcgcgaatcgacccgatctgaacggcctgttcggattttttcccataatccttgttccttactgtctgccaactcgattgatgcatgtgcgcttttcggagcacatgcagcgtcatggagccgagtatagggaagaaggtgcatcaaacctgcaacagcgggcgggggaagggctgcggttgcggtgcgaactcgctgatgcgcgggcatggcggcgcattgcattcgagataggtgcgcgcaccggcagtcttgcgcccctcgggtagccttgcgcacccccggcagtcttgcgcacctcgggcagccccgggaacctcgcgcatcccgaacagcccctggagccttgcctctgggaacctcgtgccttcgggagccttgtccacggaggcacgaggttcccaggtattggggtccagcccgaaccgtgcgccaaatcctattttttcgccgtaaacgaccgatctgaagggattttggcggctttcggggcttttcggaggcgttgtcgaatggccgtttggcaagaaggtttcggacgctgctgtgagctggggtttctcgcgctctgcacggggcgttttccctgcagttcgggagagctccttcagatcggttcttttcggcgaaaaatcgcactttggcgtgcagcgtggccggttcgccatcgagcatgaagcgatgcagcgctctcgagtgtcaggtggcgctctcgagtgtcagacggcaatctggacttcgggccgtcgaggaagcgcgcagggggccgattcgacgctgagagcggattcctccagatgcaaaccgtcatagcgttcgagaagtgcggatcgccgatcgcttggtcggtgatccgcacggggctgttcgtctacttgtaggcgtcgatatcgctcttggtccactcggtaagcgttgccgactcgcggtcttcggttgcggcggccgcgccggcgatcttgccgaacacgagcgcttgaatgaggccgttgccgctcatgtaggccgcacctccgcgcgaagagaatccctcggtgcatccgcctgcggcgtacaaacctttgatgaggcttttatccgtgcgcagcacatgccccgccacgtcggttgccatgccgccttgcgtgtggcgaatctcaccggtgatcttaagcgcgtagtacggcgcatcgaagccggcgggcaggtgggcgcggttgaacttgtcttcgcccttttcaattgcctcctggtattccgcgatcgtcttttcgagcgtagccgcatccgctccgatcgccgctgcgagttcggcggcgcttccggctttcataacgatgccggcttcttcccactcgggaaatttcacgctcttctcgacctgggtgtcggtgaagcagagataggcgatgtgatcggtttgggcgagcacgtgcggagagagttcggaatatccgccgtactcgctcatgaagcggttgccttcctggttcacgatggtgccgccgttgttggcaattccctgttcaagcgtctggtcgttgtcaacgccatggaatgcatgtccttggtaggctcccatgttttgaagttcggcgccaagttcctgcgcccaaaggatgccctcgcccgtggctccgggggcaaccatcttgaaggcgtcgactgcttcgggacagtactgtgcgagcatgtcggggttgttggcgaatccgcttgatgccaaaacggtgttcttcgcaatgaaggcgacctcgtccctgccgtttttaccgtacgctcctacgacggcgtcctcgtcatcggcgagcacgaggccgaggatctcgcaggagagcatttgggtgatggcgctgttttcgcccatgcttgcgatcagggcatcggtgaggccctttccggcatcgttggtcgtatgcatgcgatgggcggtttgcccgtagtacagtgcggcatcgatggtccatacagcgccgtgcgattcggtccactcgacgatgtctttcgactgctcggtcacggtgtatacgagatcggggcgcacgctgtagttgttcgggcgcatgatgtccatgacgcaggcgccgatgctgtcgctttcgcccatgtcggtttgctgcttggttccgactgcgggaatcttgccgctcgagagcatggtggcgccgccgagcacgctcatcttctcgcaaagcacgacgtttgcaccctgttcggccgcgctgagcgccgcgcagatgcccgcgccgcctccgccgatcacgagtacgtcggtttcggtctgctgcatgtttgcgacatcgctttggcgcttggcgtatttatatgctgcggattcctgcgatgagccggccgcgggtttttctccggcctccttatccgatggggcgcatgacgaaagtgctccggcggatgcgacggttaccgatccgatggccaatcccttgagcaggtccctacgagtaagatttcccatggcaatctcccttccttgtgcgttgttgtgcggtgcgagttcctcggctcgcgttattcggcactatacgttcggagaatcgaagcgaaaagaaactctttggcacctctatacgtcaactcggaatttacgtttcggtataaggccacgtcaggagatctgttccggatatcgttctcgacatgcgtccttgtgcatcaggtatgtggtcttgtgaatgcagacgttttgcctatactgagcccatgggatggccgcacggcagttcgtttcggctggcttgcggcaatgggatgaaccgatggccatgggggtggaaactgtggcgaagttccgtatggataccgatcagaaacgctacttttgcacgcttagctctgccggcaatatcacgcaggcggcgaacgcgctgtatttgtcacggcagggcctctcgaaaagcatgagggcccttgaggcgcagatcggcgcgcagctgttcgttcgggggaagaagggcgtcgagctgacggaggcgggccgcatccttttgcgctaccttcgcgaggaagaccggctgtgggatgcgtgcgttgcagatgttcgggatgccgaaaagacggcgcctgagctggtgcgggttgggttgctcagcatgtacgtcggctacgatcagaagcgcgatctcttggcaagctttcagggcgatgcgagcatcagaatcgaaatcgtcgacggggatcatgatgccttttgggatgccattgccgagggcgagatggagttcgctttcactgtcaagccgcctgatgacttcggtcttccgacaatcaagctttgcgacgacagcctttccgtcctgctgagcgtgaacgatccgctcgctcggaagaagtgcatcgatttcgagaccgatttgcggggtaaaaccgtaatccagacgagcccctataagggtcggctgtacgaaacggcgttcaggaatcacggcattaagtgcgagttgctgttgcacgataagaacctgatgcttgcacaggtatctacaagcgaggattgcttcatcatccaaacgcactatgcaaaagcgctggtaaccgatcaggtgtgcatgcgcctgctcgtgaatgccccgatcgagatggattcgatgttcgtgttcaggcccgacttgagcgaaacggggcgggtcgtggcaagacggctgctcgagcggtatggcaaggaagcggagctcgatgcgttcttcgatacgggcgaagagcaggcagagtgcgggcgggagatcgtctataatagttgccatgactgacgaagagtacatggggcttgcgatcgagcaggcccgcaaggccgaaagcctcgacgaggttccgatcggggccatcgtcgtctaccaccccatcgatcctgccacgcgcaagccgctggccgaaccgcgcgtgatcgcttcggcgtgcaatcttcgcgaaagcacgcaggatcccgcaggtcatgcggagttcttggccatgaaagcggcggcggaagagcttggcgtgtggaggctcaccggctgcaccgtgtacgtgacgcttgagccgtgcatcatgtgcgcggggctcatgcatcaagccagaatcgaccgttgcgtgttcggcgcgcccgatccgaaggcgggggctgtggggacgttgtatcgaatcaacgaagacgagcgtctcaaccacgtcttcgaagttttagcgggggtccgtgaagaggaatgcgcggatctgttgagcacgtttttttcaaacaaaaggaagaaaaagaaagcatgaacgaaaacgcacccatggtagtgtccgatccgctggccgctttcgagcgcgagggtatggtgaagctcgtcgcgccggcgaaaaccaacttgtttctcaatatcggagagaagcgtcccgatggataccacgaggccacgacggtcatgcatgcgctcacgctgcacgacgtgctccatatggactgcatcgcgcaaggtggtggaggtttgcagatcgaggtatcttgccacgcgcgcgagggtttggagcagttgagcatcgcttcagaggacaacatcgtgcacaaggcgatcgctctgcttgcctgcaagctcggccgctcggaaaacgaattgatttccgtgcgcatcgaaaagcacattccccacgaggcggggttaggcgggggatcgtccgatgccgccgccgccttggtcggcgccgcaaagctctggggcgtcgatgccgatgcgctggaaattcgcgaggccgcatgcgagctgggtgccgatgtggcgttcttccttcacggaggatgcgcgtgtctgacgggtgcgggagaggtgtttcaccatacgctcgatcccatgaaaaaagctgcggttctcgtgaagcccgaaggcggcgtgtctacttcggcggcgtatatcgcgttcgatgccgatcctgttgcacttgatgctgcagaccaagaggccgcgcttgcggcggtttgcgctgaagacgtcccgctgcgcaacaaccttgcggccgcttcggaatcccttttgcccgggcttgcggagatgcttgcgtggttggccgatcaggagggcgtcgagggctcgctcatgtcgggaagcgggtcggctgcattcgccgtttgcgcaacgttcgacgatgcatgtcgaatcgtcgccgcagcgcgcaatcgcgggtggtgggcgcgaacgaccgcattcagctcggcgcgtgcggcggtgatcccccggtagcgagcgtttggcttcgttgcgggcccgccccgaactcggccgacctgcggccgctcctagcttggacgggttgatacaccaacgttcgggatgctgcctcggcggcgcttgtttgggatgagtttgacgatcgatgcgcctgaattgcacagtttttgccagattcatacatgcctgttgggggacgttcttccgaattggcgctcgaagctttttgatcaggcgaaacggtttcctcccgattccgtgaatgcgaataggaggatatttcggcgctaggtgccaccgcaaatgtatgaatctggcaaaaactgtgcagatcggactcgtttcgccgctaaaccaggatcggcccgccttcgggggtaagcgccaggatcggcccgcccttgcgaggcggacgccgggatcggcatggccccgtgaagcagacgttctgcgctgctggatcgcccgtaaaaggcattctttccttattgatattaattctcaataagcctataatgggcaaatcggtaaatgcgtgaggaagttcgcctgcgaagaggttcgctccgcgcccgtgcgggcggcgcgcaatgaggacgagagaggttcacatgaaaagatacgtttgctctgtttgcggatacgtgtacgacgaggaagcgggcgatcccgataacggcattgctcccggtacgaagtgggaagatctgcccgaggattgggcatgccccctgtgcggcgccggtaaggaaaatttcgaggaagaataaactcacccgatcaggagatcatcatggatgctatgaaggagctctcccgaggggagctgagttctctatgctctaatcttgcaaaagcctgcgaaaaacaacagcttttcgaccagcagaagcagttcctcgagctagccgattactatgcgaagcatgccgagcccgctgatgcggcgaacatggaggcgatcgaggccatcgtgcgcggggatctcgattcgggattcggccccgctttcgagcaagcccacgccgaccatgaccgcggtgcactccgagcgctcacctggtcgcaaaaagcgacgacgctgctcgattcgctgctgaagcgatatgcgagcaaaggcgacgctctcatcgagggcacgagcgtatgggtgtgcgagatctgcgggttcattttcgtaggcgacaatccgcctgacgtgtgccccatctgcaaagtgcccaaatcgaaaatcgtgaaagtcagggggtagtcatgtacgcacctgaaacctatgcttcgcgcaacatcaagctgtgcaccaaggattgcctgtgcctgttcgtttgcccgactggggcaaccgacaccgaaaacgggcaggtcgatgcttcgaaatgcctcagcgggtgccgcttgtgcgtggatgcgtgcccctcgcatgcgctttctctcatgtatcggagctatccgacgccgcaagagaagaccgatgcggtcgtcgggcagctcaagggggttgccaaaagcaagaccgaacttgaggctgcggcgaaagcccttgccgagtcggcggaaagctccgagcagcgcgcacttgcaaaagccattgcgatgtcggctcgcatttcagccgaagacctctatcgggaatcgcgctatatgattccccagggcgatgaagcgaaagcgcttcttgcgggaatgcttgcagaagagcagggcgaagattttccgcgggagaccgtcgaaaagttgctcgagacgctgtagatcgatcggcccgaacggcgggaagcccgcgcaagccgcgacgggcgaacgcctaggttacgggaggttgacgaatttctcccagacgcgcttgagctctgtgcgtctgggaaggtggttgcgtgcatgctaaaatagtgccacccaaccattaaggagaaccatggaaatcgcattgatcatcattttggcgatcgtcgtcatcctcgtgatcgcggttatcgccctgtacaacaacctcgtgaagctgcgcaacatggttgacaacgcatgggcgcagatcgacgttcagctgcagcgaaggctcgatctcattcccaatctcgtcgaaacggtcaaaggctacgcatcgcacgagcagggaacgctcgagcaggttaccgccgcacgcagcgccgtcatgagcgcgacgagccgcgagggaaagatgcaggccgacaacatgctgaccggcgcgctgaagagcctgtttgccgttgccgaggcctatcccgacctcaaggcgaacgtcaacttccagcagctgcaaagcgagctttcgaacaccgaggacaagatttcgtacatgcgtcaaagctacaacgatacggtgatgaagtacaacacgtccatccagacgttcccggccgtcctcttcgctgggatgatgggcttcagcgcccgcgatagcttcgatgccgttgcaggcgccgagaccgctccgcaggttcgattctaagcctgcagggaacaaccagcggctgctttcatcgaatgacctgatccgtgcaggtaacggatacgattcgttacctcgattgcctgattaacgaggtattatattcagaaaagtcagagatgaaagcagccgcatcgcatggagcatttcaccggttctcgcacgtcggatgagcgttgggagatatccagaacgctttccgccatcaccgccgtccttctcgcccttctgcttgttgggttttacggtatgactctattcaacatgcgggagatcggaaagcagatcgtcctgatcaaagagcacccctacccggtcaccgtagctgcggggcaggttgagaccgcgctcatgcagttgcagaccatttcggagcgcgtgaaatacgtgagaaccgatcaagccatcgccggggtggaaagctcgtatgaaaccatcgatggccgcatcagagacaagctgcagctcatttccgataaagccctctttactgacaatgatgtcgaagcgatgcagggggaatacgaagagctcgtcctgttcaaaaacgagctccttgccatgtcgggcaattctgagatctcggattcggatattgccacgtatgtcgacgagcagataaacccgctgatcaatcagcttctgcggcaaaacgatgcgattctcgacaatgcatcgcaatcgttcgatacgctgtacgaagtagccgatcaggtgatcttcagaaccattgtggcctcttcggtgctgatggcggcggtgctcggagcgctggtgttctatctggcgcagcttagcaagaagcgcaagcaacgcgagcggctgcagcgcaacctcgagacggcgctttcggttgcccaggaggcgaacgctgctaaatcgcagtttctatcgaacatgtcgcacgatatccgaacgccgctcaacgccattatcggactcacggcgattgctggaacccatcttgacgataccgcacgggtgagggaatgcctgagcaagatcaccgtatcgtcgaagcatttgctcggccttatcaacgatgtgctcgacatgagcatgatcgaaaacggccgcatctcactcaacaacgaggcgttttcgtttcccgagctcatcaacgggtttgtgaccatcatccagccgcaagcgaaggcgaagcagctcggcctcgatgtcgttgtcggcaacgttgacaaggaaaccatgatcggcgattcgatgcgcatcaaccagatattgctcaatctggttggaaacgcgatcaaatacacgccggcgggcggcaacgtgcgcgtgaagatagcggagctgcccgacgggcgggaaacctaccgccgtctcaggttcgtggtggaagacgacgggatcggcatgtcgagagaatttgccgataggatattcgatccgttcgagcgcgagcgaaactcgacgacgagcagagttgaggggacaggcttgggcatgtccatcacgaagagcatcgtcgacatgatgggaggcacgattgccgtagaaagcgagctgggcatcggttcgaagtttaccgtcgagttgccgcttgagataatcgatatcgatgaggagttcgaggctatcgatcttgccgaagccaaggtgctgctggttgacgacgatgcggatatctgcgaaagcaccgttgagatgctcgcggcaatcgggatcgccggcgattgcacgcaatcgggcgaaaatgccgtcgaacttgttgttggcgcccacaaagcaggccgtgattaccacacgatcatcgtcgactggatcatgcccggcatggacggcctggcgaccattcgatgcatacggaaggagatcggggatgaaactcccatcgtgctgctgagcgcctacgattgggcagaaatcgaagacgaagcgcttgaggcgggcgtgacggctttcttgtcgaagccgctgttcaaatcgaaactctaccatgcgatgagaagcgtatgcggcgaagacggacgctttgaacgcgctcccgaacaccagcaggcgctcgattgcgcgggcaagcgcgtgcttctcgtagaggacaacgaactcaatatggagattgcgcaagaggtgatcgaacaggctggcgcaatcgtcgagtgcgcatgggacggcgtcgaagcagtcgaaaaggtcaagcgggcaccagaggggtattaccagctcgttttcatggatgttcagatgccaaggatggacggacttgcggcttcgcgggccatttgcgaagaagcgcgggcgagcggtaaaaagcgccccccgatcgttgccatgtcggcaaacgcgttcaccgaagatcgccgccgcgcaaacgaagcgggtatggacggctatgcgaccaagccgatcgacttcgccgagatcaatcgcattcttaaaaaatacctgtcgtagggaagcagggcgggcatcgcatgagccggttcgtgcgatgcgggctgccggcaagccggccgggtgccggcaggcttgcaacctcgatgcaaacagcgtgtcgaaagacgcgtttccgtgtgttgtccgatgcgctagccgtgcgttatctcaaggattgttttgccgttcttgccccgttggccgatgctgcgatgcgcggctgccgcctcgtcgagcggaaaggtttgatcgatggctatctccatcccgctttcgaggccggcggcaagggcgtgcatgacggcggcagtttcccgttcgctcatgttggcgatgcccattccgaggatcgcggcgtctttcgccatggttgcacgcgggtcgaattcgatgacgcctctgctgccgacgacgacgattcgcccgcgcttcgatatcatggtcagatctttcatgaggttgatatgcgcattcgtctctacgacggcatcgatgccccgtccgttggtcgcgtcgatgatatcgtcggcatatccctcttcccgatggttgaaaacgcgatgcgcaccgagccgggagacaagcgcttttccttcggaatcgcctgcggtgccgaatacgatggcacctcgcctgcgtgcgagctgaacggctagcgttccaacgccgccgctggccccgtgcacgagcacgatttctccgggcttgatgtcggcgcgcacgaacagggcgtctcccgcggccaatccgggcgttccgattcccgctccctgctcgaacagcagagaatcaggaagcttttgcacggcggcggcatcgcatgccacgtactgagcataggttcccgtgttgcgtttcgccagcgaagcggctacgaaaacgcgatcgcccgcgtcgatgccgccgacatcttcgccgacggcatcgataattcccgctccgtcggttcctggcgtgtagggcagtgcgggaaggcggggatagtcgcctgctcggatatacgattcgactgggtttaccccggcggcaaacagcttgacgcgcacttcgccgcgctgcggatcgggtacgggaatcgattgcggttccagcacggtttcgtcgccgaatttcgtaacgacgatagcttgcatgttcatgggtgctcctttggatcttcagatgagccgatcatagcggagcaaggctgccaagctgaatcttgcgggaaagtcggcactgaggcgtttcctaagagttgccgaatgccaatgttcgcttgcggcgatttacgcagacggttctgcttcctggttgcgcgggcggtttttttgcccccgatgctcccgcttcatttcgtacatgtgcacatcggcgcggcggaccaggttggatagcgcttcgcccggtttcctgatggcgaatccgcaggaaagggagaggcgcatatcgttgccgagcgcggtttcggcaagcttgtcttcgagctcgctcatgaggtgatgcgcgcgatcttcgtcgagttccctgcagaggacggcgaactcgtctccgccgatgcggtagacggtaccggtgcgttcgaacagctgctcgatcagcttggctgctgcgcagaggtactcgtcgccgaaagagtggccgaaccgatcgttcatcagcttaaggcgatcgaggtcgatgacgaatgcacctgcgatcgcggcgccttccgcttcccagttcgagatatcgatgtcgaatgcgtttctattgcgaagcgatgtcagatagtcggtgttggaaaggtctttgtaggcgggattcgaaatcctgcggaatagaaaccgcgcgaagacgatagccgcaaggccgaagacgatcccgatgaggggcgtcccgattcgaaccatgcgaaacgcctggtactgcgcttccgcatcgaattcgatgccgatcgcgccgatcacctcgccgttttcatggatgggatagtacgatacgaacacgtagccccagcctgtatctttgatgtcgttgggatacacccgttcgtcggcgagcgcacgatcgagctcgcccgtgatttcttcctcgatcgcatcgccgggaaagcggaaatcctcgctttcgcttggtagcccgtctatgacgtagatgagctcgccgtcgtcggtccgtttcgccgtgtacagatagcgcacgcctgtcgattcccgtaccgtctcgagctgctctttggtctgtcggtagctttccgattctgcatcgtcgcccgattcgatcgtttcgaacgttgacttgtcgagcttgtcctcgatgaacgaatagatgctgtcggttcgggctttcagcatgtcgatcatgttgttgtaggtgatcgagtacgtaaaagagaatacgcagataaacgagagcgctacgagtacggcgacgatgatcgacacctggagatcaaccctgctgctatgattgccgaatcgcggcataacgtccacctgtctggttaattataagtaaaacaatactatatgaaaacgattgcggatataggcatgttcgggatatcgggcaggtgggtcggtgcttctcccgtcggtgcggatgcgggaaaacctggaagggggtttcgatcggaggtttggcgggcgcgcgcatgctgccgaatcggtgacgctgttccgttgaaacgcgtatcggcgtgcggctagtgtacaatgctcaagagctgtacgtgaaaaaagacgacgcccgcagcaggtgcgagcgtcgtttgcgattcgaagtggcggagagccggggattcgaaccccggacacgcttgtggcgtgtactcgcttagcaggcgagcaccttcggcctctcggtcagctctccgcgaaataaaggtgcggtttgcaatgataccgtttggaccctcatctggcaaggaggatgaacgtgcaaaacatgagccgtccgcaaatgggagcgaggtttttacctgctgctctggcggttttcgtactgtgcttggttgccgcgatcgccgtaatctccgcaacgcccgcacaggcgcatgcgaaaagctatacatgccccaaggtagacatttccgccaacgtgtccaccgacggttctctcgacgttgtcgagcagcggacgttcgacttcgacggcagcttcacggcggtatggtggacgttcgacagcgttcccgacaacggatcgctcaaggtgaacggcgtgagccttaccaaagtcgatgctgacggcatgccaacgggcgaaaccgtccagctcggtgaaacctccttcaatctcgattggcgcgacgccggtggtcccggcaccgattcgtactcggtcgattctcccaagaattccgtgtacgtgttcttccatgcttcggacgagaggatggtcatcacgctcgattacaccatcgaaaacggagtcgttgcgtacaaggatgtagccgatgcgtattggaagtacatcggcgaccagtgggaggttgcctccgagaacgtaacgatgacgctttcgctgcccgtgccgcaggacgtttcggtcgttgcgggcgagaacgtgcgcgcatgggggcacggtccgctcgacggaacgctggccatcaacgccgacggcacgatcgtctataagaatcctcaggtgaaccccggccaatacgccgaggcgcgtgtggcgtttcccgtggaatggcttgcaaacctcaagggcgaggggtcgcttgccgcaagggatcaaaaccacctcgataccattctcaaggaagagcaggcttggtctgatcaggcgaatcgagatcgattgttctcgcttgtcttcgttatcgcatgcggcatcatcgcggtgttgctgatcgcctgggcgctgcgtgcgtacttcaaatacgggcgcgagcacaagccccagtttaccgaagaatactggcgcgacgttccgtcttctcatgaccatccggtagtgatggcccgcctgtggcggtggaatcgcgagagcaacgacgatctgacggcaacgctcatgtacctttcgcataagggagcgatccagatcaacaagggaagctacgagcagcccgcatcgttcgggcgcacgaagaccgtcgacgactattacctaacgcgcgttcccgccgtggcggacgcgctgaccgatccgatcgacaagatggccatggacatcctgttcaacaaggttgccaagggcgccgattcgctgtggttcggcaccattcagcagtacggaaaggaaaaccccgaggagttcgtcgatgcgctgaaaacatggcagggcatcgtgaccgctgccgtgaacaggcgcgatttcttcgaagcaaaaggggagcgctatcagtggctcatccttggcgtggcgatcgcgttcggcgttctgggggttggcgcatcggtgctcatggagaacttcattcccctcgttttcgtggttcccaccgtgatcgcccttttggtgattgcgaactacatgccgcgaaggagccaggagggaagcaccctcgatgcgaagtgcaaggcgcttcggaattggctgaaagatttctctgcgctcgacgagcgccccccgaccgatgtgaaggtgtggggcgaattcatggtgtatgcgtttatcttcggcattgcgagcgaggtcatcaaggcgctgcagctgaaggttcccgaactgttccaggatgatggcatgatgtattcgagcggatatgttccgtggtggttctggtacagcacgtcgcacggggttcacggtacggcaatgccggcggcaagcactctgttccagtcatcgctggccaacaccgtgagcactgcgcaagctgcgatgtcggcggctgagggcagcttcagcagcggcggcggtttcggcggaggcttttcgggcggcggaggcggcggtttcggcggcggaggcggcggcgccaggtaggttatgccagagcggactgcggcggcgtgctggaaaacgctttgctgcagttcgctttttctcttcgcggcggcagtcgtgcggctcgatacccgcttccggcgcggcattcgcgttcttgatttctataggttttgttaatatgttacttagcttattacattcagtagcatattacattatagtgggttttcggtttcgggcgctatcgagccggctgcgtgcgggagctgttgggagcatgcgagctgcagacgatgggcctgaccggccaagccgcgccgatgggttcggcttggcaatcggaccgccaagcgattgcgggcatcatgcaagatgccctgattcgaggtatatatgagaacaacattcgggaagcgcgcggcacgattggcgctcggcttcgttctctgcacggcaatggccgccttcggcttcgtcgcacctgctcctacggcttatgctgcgacgagcgccgagaagaaggccgaggcggaagcgctcatgaagtcaatcgatgagctgcagacgtcgctcaacgaggcagacgatgagtacgatcgcgcaactgaggaatacgaaacggcgaaggctgctgccgacagggcggctatccgcctgcgggaagcgaacaagcttgtcgagcatttccaggagcggcttgcccaatgcgcgacgaacatgtacaagagcggcggttcggcttcgatgctcgatgtgctgctcggagcttcgtcgttcgacgaagcagtaacgctttgggattctttcgggaagataagcgaacaggaagccgccttggttcaggagagcaaagacgcgcaagccgaagctgaagctgccgaaaaggatctggccgagcaagaagcgattgccgagcaagaagccgaaaacgcgaaggcggcccgcgacgagatcgccgctgcgaaagaggacatggatgcccagctcgagcaagtgaacgaagagctcgttatgctcaaggcgaaagaggaatcggaaagcctggctgccgacgaggccttgcggcgactccaggaggcggatgcgctggtcggtggatctggaagcacgatcgcgggatggtctcacccgatcccctcgggcgctccggtgacgaacgaattcggatgggcgggcgcgtgggatggcgaataccataacggcatcgacctcggtgccccaacgggtacgcccattgtggctgctgcaccgggcaccgtgtcgtacgttggcgactacggctctggaggcaaagcagtcaagatcaatcacggaagcggtcttgtgaccatctacatgcacatgagcagccaggccgccacgatgggccagcgggtttcggcgggcgatgtcatcggctacgtggggtccaccggatactcgacgggtccgcatctccatttccagatcgagcttgacggcacgcctgtcaacccgcgccacttcatccacttctaagagttttatccgcagcgcattaagattcgataaaggggtcttctaaaaaccagtcaatggcataccatgggcttgtatcccgattgaccgttcggttaatcagtggcgatagcgaggcttaatcagcttcgcgaactggtaaaaggaaggcctatgggcgatcgattcaagaaattcgaaagcttacccgaagagcgtcaggaggccataatcagtgctgccgtcgaaacgttcgggagcaatgattacaagagcgcctcgaccgaggacatagcgcgcaaggcgggtatctcgaaggggcttttgttcttctacttcaagaacaagcgcgatctgtacctgtatctcatggagcggttgatggagaaggtcgaaggctttgtgatcgatgacgattactgggaaatcgacgacttcttcgagctgttccgctacgcggccgagcgcaaacgcgacacgctggaaaggtttccgtacatgctcgagttttcggttcgcgcgttctatccccagcacaaggatatcaagcacacgatgaacgattggacgcagcgacagatcgactatatgttcgagcgttatttctctcacgtgaacttcggcaaatttcgcgatgacgtcgatcccaagtacgtggtcaacatgatcgtctggatggcagacggctatctgcatcagcagcttgccctgcgcaagcgcatcgacgtcgatgcgctgatggacgagttcgccgtgtggtgcaatatgttcaagcagtatgcctacaaggaggaatacttatgaatcccgttatcgagttgcgcgatgtgacgaaggattacggcggcgggcgaggcgtattcgacgtttcgcttgcagtcgagcagggcgaggtgttcggattcctcggtccgaacggagcgggcaaaacggtgacgatgcgaaacctcatggggtttatcaagccggggtcgggagcggtctccatcaatggcatggactgcttcgacgaccgtgcgaagattcagcgtgatctggggtatctccccggcgagatcgccatcatggacgagatgacgggaacgaagttccttgaattcatggccggcatgaaaaagattcgcgatctgcgccgcatgcgcgagcttatcgagctgttcgagctcgatccatcgcgcaagatccgcaagatgtcgaagggtaccaagcagaaggtgggtctcgtgtgcgcgttcatgggaagccccggcatcgttctcctcgacgaaccgacgagcggtctcgatccgcttatgcaaagcaggttcatcgatttggtgctcgaagagaagaggcgcggtgcgaccatcatgctgtcgtctcacctgttcgaggaggtggagcgcacgtgcgatcgcgtggcgttcatcagggcgggcaggatcgcggccatcgaaacgatggatgacgtgcgcaaatctcgcaagcgcgtgttctcggtagcgttttcgagcgaggcagagcaaagccgctacctggcgtcgcatgccgaggctcgcgcctcgggatcggcaatcgaggtcgtggtgtcgggattgatggacggtttcgtaaaggaccttgcaacatacggagtcgccgacctgtcggcgcgagagcaatcgcttgaggaattgtttcttcatctctatggaatggatgggaaaggggctggcaatgaatagaaccctgttcgggaaggaactcaaatcgaacctgttcgtttccgggatcatcgtcgctgtcgtggccatgtacatcgttgttatcgtgagcatgttcgatccgaagctgggcgagagcctcgatctcatgatgcagagcatgcccgagctgttcgcggcgttcggcatggcgacgcagggcgcgacgatgctcgatttcctgctgaattacctgtacgggtttctgctcgtgctgatgccgttcgtgcttgcgctcatcatggtgaacaaactcgtcgttcgccccatcgatcagggaacgatggcctatttgctggccaccccgaacagcagggccaggattgcatcgacgctggcgggggttcttgttgcgatgcttgcgatcgtcatggtgctcatgaccgtgatcgaaatcggatcgtcggaagcgatgttcgccggagagctcgatgtgggcgggatgttgcaggcgaacgcgggcctgttcggtttatggctgttcatggcgggactctgctttctttccgcctgcctgttttcaaacgcgggcgtcgcactgtgggcgggcggcggactggtcatcctttcgtatctgattcaagcggtatcgcaggtgggcgataagttcgagttcttgaggaacgtcacgccgcttacgcttttcgattcgtacggcttggcggctggcgagatggctgccgtgggcggggcgatggcgctttatgcggcgggaatcgcgttcttccttgcggggattgcggtgttttgccgccgcgatctgtcgctttagcggaacagccgcattgcttggcggatccctgtcggatcgtgccgaccgataggggtccgcgttgcgtggcgccttgcgcgcgaagcgcgggccgccgtgtgtttcagacccataacggagcgcgactcgcggccgtggcgctgctataatcgaaaccctgcgacggatgatgccgcagcgcgcatgcgcgcttgccgaaagaccgctcaagcggcatggaagcacgcgtctggtcaaccgaagggaacgttatggcggaagagagaaaagacaacatcattctgatcggcatgcccggtgcgggcaagtcgacgctcgggatcgtgctggctaagatactgaattacgatttcatcgatgcggatctggttatccagaaccagtgcgacaaaacgcttcagaagctcatcgacgcatgcggccccgagggattcatcgaggtggagaaccagatcctcaaagacatcgaggccactaagagcattattgcgaccggaggctcggcggtgtattccgaggatgccatgaaccatctttcttcgatcggacgcgtggtctatctgcagatctcgttcgaggaactcgtcaatcggctgcatgatcttcaggagcgcggcgtggtgcttaaaggcggcatcggcatgagtctgcgcgatttgtacgacgagcgcaaaccgctctacgagcagtatgccaacataacggtcaacgtcgatcatctgtccatcacggcggcggcgcgcaaggtcgccgacgcacttaaataaacgcgcatgaaaaagcatttgaccgggcgagtcgcgccccgatgaaggagaaagctatgaccgaccatatcaagaccgctcccgtaaagccaaacatcacgatcgacgaccttgataagatcgatattcgcgtgggtacgatcgtgcttgtcgaggatgtcgagaaatcgaagaagctcatcaagatgacggtggacttcggggatttcacccgtacgatcctgtcgggaatgaaggaagaacgcgaagatccgaaggctgagatcgaaggcaagcaggctctgttcgtcgtcaacatggcgccgcgcaagatggcgggcgaggtgtcggagggcatgatttacgacatcggatacgaggatggcatcgttcccgtgctcgccgtgcccgaaagcgaagttcccaacggggtcaggctgggctaatcccgcgaaagggctgcggcagtcttggttgtttcgccctttgggttcaacggcaagcgcccgaagcgtcgcgagcgggcttcgggcgcttcttctgttgcgggcagctgggtttcggaggctgattacagcgcagggcgtatccggtcgatgtaggcgcggatgaccgctaccgcgtcgtcggcggtgagcttcccgctgtttacgcaaagatcgtaattggtcgcttctccccatttcttgtcggtgaagtagcggtagtagtgcgcgcgatccttgtcgattcgggcgatgcgcgccttggcctcgctttcgctcaggttgttgcgtcgcatgacgcgcgcgatgcggttttccatcggagcgctcacgtatatgctgataagtcccggataggcggagaggatcgaatcggcggaacggcccacgatgacgcagggaccctcgtctgccgccgagcggatcgagtcgatttccgccgcatggatggccgaggcgatgggctggtcaagatcggctcccgtaagaaagcggttcggcgtgaagaggaatcgattgagcaccttttcgtcatgcgcctcgacgacatcgtcgggaaagccgcatttctgcacgatgcggttgatgagttctttgtcgtaataggcgatccccagcgtagacgcgagggtttcgccgatttcgcggccgccgcttccgtattcgcggctgatcgaaatgatgaggttgtcgttcatagtgcgtctctctttccgtttgtccgacagcttcggcgttcagccgtgcagctctttactgtgccttgcgaacattgtaccgttatcttcgaaatgcggtatccgcaatgcacttaatcgggttcgtgtgctaggatagctccttacgcattggcggcacggattcgcttcggcgcgtttgccgccgcagcctgcgactgccgtcgcccaccgccgagaacaaccgaaaccaccgaagcagaggatcacatgtcggacgcaacgagcatgaaggaaaacgaaaagcaatcgcccgatcgcttgggcactatgaagatagggaagctccttctcgagttttccatacccgcaatcatatcgatgatattcaactcgctgtacaacgtcgtcgacacggcgtttctcggtcatgctgtcggcgatgtgggaatcgcggttaccacgcttgctcttcccgtcatgaccatcctcatgggattttcgatgcttgccggtcagggcggtaatgcgcttacggccatccagcttggcgagggacggcgcgatcttgccgaaaaaacgctcggcaattcggcgatgctgctgatcgtcatcgcagtcgtcgtcgccctctcggcggttttcgccatcgatccgattctcgctttggtgggaaccgatgccgaactctacgcgcctacgaaggcgttcgtgcagatcatctgcttcgggttcatcttccaatcgctcggcatgggtctcaataacttcttgcgcacggcgggcaagccgaaccttgcgctctacaccatggtattcggcacgactatgtgcatcgtgctcaacttcttcttcgtcatgctgttcggatggggcgtcgagggaagcgcggtcgcgaccattctcggccaggcttgcggcatggtgccggttctctggtatttcatacttaacaagaacgcggcgtttcgcctgcgccgctcgtgcatggtgcctgacattcgcctgtgcggcaaaatcctttcgctcggtcttgcctcgtttgtcatgcaggtagccgctaccgctgtaacggtggtgctcaaccagctgcttgccaaatacggcgcgatggacccgttgggaacgaagggcgcgcttgccgcgatcggtacggcgaacaaggccatcatgttcgccatcatgccggtcatcggcctcatcatggggtcgcagcccatcatcggctacaactacggcgccaagcagtggcagcgcgtgctcgatacggtgaagtgggcaagcgtgtgggcgaccgggctcatgatcttcttctgggtgctcgtgcacgtgatccccggccctatcatcgggatcttcggcgtttcgggcgatctcgaggagttcgcgatcacggtgctcaaactcgatacgctcgtgctccccatcgtcgggttccagatcgtgggctcgagctacttccaatcgagcgggcagccgttcaaatcggcgattctcgagatgacgcgccaggttatctatctcattccgctctacctcatcttcccgatggtgctgcctgcgctcggcatatcgccgctcgtggcgatcgtgctcgccgtgcccaccgccgaccttctctcgtgtgtgactacggcgttcttcgtggcggtcgaggtgaagaagctgagaaggctgcgcgatgcgaaggcggtcgagcccgctgtcgcgtaaaacgcttcgttctgcacactttttgccagattacgacatgcgtgatgtttgcaatcgttttccgggattacggccaagcttgtgatctggggaaacgatttgccgtaatcatataggcatgcaacgggtgcgcgatcggcatccatatggacgtcaaaatgtatgaatctggcaatttctgtgcaatttagcgcgctttgccgtcgagcggggcggaatgcaggctccatactgcgctgtccgctgctgtttggggatgcgctacgaggggcggtgtacagtcgattgctcggcttgccaagcgccatacccttaatttttcttaatcatgtttcatcaatcttaagcgccgtttggattgaaagcccttcgcaacaaactcataattactttccgtaagcggcctttctgctccgacaagtggcttttaaggctgtgcgagacgagagaacacgacatataagggagaggaattatggggaagattctcgattccaccatcggcggcaatctgagccgaaggaagttcctggtgctgtctgcgggagctgcagcgctcgccggtcttggcgtgtcaggttgcagtccgaagcaggaaagcgcttcgaccgttaccgagcattccgagccgatcgacgccgaggagggcgcaacatgggttaccgccgcgtgttggcacaactgcggcggacgttgcctgaacaaggcgctcgtgaaagacggcgtggtgctgcggcagaagaccgatgacacgcacgaagacagccccgactacccgcagcagcgcgcgtgccagcgcggtcgttcgcagcgcatgcaggtattcggcgccgaccgcctgaaataccccatgaagcgcaagaattggagccccgaagagccccacggcgaacttcgcggcgaagacgagtgggagcgtatcagctgggacgaggcctacgagcttgtcgcaaccgaaatcaagaagatctacgacgaatacggccccgagtcggtgttcgtgctcggcggttccgaagttccccgcgtgttccagcttatgggcggctatacgcctcgctggggtcaggtttcgtggggcgcgtggcccgatgcctacgcaatggtcatgggaagccctggatactcgtctgacgctcccgaccgtttgacgctgcgcaagcagaagctcgtgatcctctggggcgcgaaccccgcaaattcgagtgcgggcaatcccacctacaactacctgcaggcgaagaaggccggcacgaagttcgtcgtcatcgatccgcgctacaacgagaccgccgaagctcttgacgcccagtggattccgattcgcccctcaaccgatacggccatgatcctcggcatgatcaaccatatcatttcgcagggtctgcacgatcaagagtaccttgataaatactgcgtcggcttcgataaagaccacatgccaagcggcgattatcccgagtacacctacaagccgctcgagcgcaacgagttcaccttcgcctccgagcctgccgatccctcccagaacttctacgattacgtgatgggcgagggcgcgtttgccgccgagggcgcaaagactccggaatgggcggctgagatatgcggcgtcgatgccgaaacgatcaagcagctggccgaagagtacgccaccaccaagcccgcaaccatcttcgcaggcggcgctcccgcccgcatcaacgaaggcgagtgccttccgcatgcgatgctcacgctcggcatggtatgcggccagatcggccgcgacggcgcatcggtaagcggcaccatgcacaactccgcatcgaatggcggcggcgcgctggtttcttcgggcggtgcgggcgttaaggtcgagcttccggcgaatccgtatcctcagaagcagtacgccctcaacaacggcgagatgtggaacgccattctcaacggaacccataccatgtacaagggcgagacgcgcgacgtcaacattcagatgatctaccagggcatgggcggtgcgctcaatcagcgtcaggctatgacgcagggcatcgaggcccataagaaggtcgagttcgtcttgacgatgaactacgtgctgaacacgagtgcgaagtactccgatatcgttttgccggtcacgaccgagtgggagcgtcccggtacgttgctcaccggcaaccgcgagatcctcatctacggccagcacattaccgacccgctatacgaggcgaaaagcgatcaggaaatcgctatcggcatcgccgagaagcttggcttcaaggccgaagaagtttacgacatcgatgagacgcagcagctgttcaacaagctggccgggtgcacggtgctcgggtccgatggcaaaaccaaggagccgttgctcaccatcaccgaggacgatatcaaggagatgggtgttgccggagagccgcaggaaggcagaatcacgctgcaagagttcaaggagcgtggcatctatcaggtcgaacgtagcgatggcgatgcgtatgcgaaccttcccttcgcgaagttcatcgaagatcccgaagccaacccggttgccaccgccagcggcaagttcgagatctgctgccagtcgctttcgagctacatcgatcatgttggcttcagcgagaaggatccgttgccgaaatacgttcgcgttaccgaaggctacgaggacggtgttgagaacggtcgcccattccagctgctcacccagcactatcagcgccgctcgcaccacgtgttcgacaatgtgaactggctgcgcgaggcttggccgcaggagctgtggatcaacgcttccgatgctgccgagctcggtatcgaaaacgacgatccggtacggctttcgagcccctacggctcggttgtgcgtccggcttttgtgacccagcgcatcatgccgaagacgatcgggctgggcgaaggcgcttgggcgcagctcaacgaagatggcgacgatatcgccggtgccacgaacacgctctcctctccgattccgaccgggcaggggcataccgggttcaattcgaacaactgcgtcatcgaaaagtacacaggcgagcttgaccccgactgcgaatggccgcagcgagtcatcttcgaatagtcggaagggagtaaaccatggcacaaatgggattctatttcgatcagaccgcctgcatcggttgcaagacgtgtcagatcgcttgcagggataagaacgccctgtacaacgtcggcgagattttccgcaccgtcgaaacgaccgaagtgggagaattcccttcggtgaggtactacagcacttctgtttcttgcaaccattgcgcatcgcctgcttgcgtggccaactgcccgacgggcgcgatgtacaaggacgaggagaccggagtcgtgcttcatgacgacgagatgtgcatcggctgcgaaacctgcgtttcgtcatgcccctacggcgagccggtgtacatggaggacgagggcatcgtgcgcaagtgcgattcgtgctacctgcttcgtgaaaagggcgagagtcctgcctgcgtggcggcttgcccgatgcgctgcctcgatttcggcgatctcgaagagctgaaggcgaaatacggcgacgatcttgtttccgatatcaacggattgcccgattcgtcggagaccacgccgagtttgctgatcaacgcccgcgatattgcggtgaagtagcaaggcgcagatcttgcggcccccgacccgtccgtgctgtatcattgcatggggtcgggggccttgctgcatactgccgatgcgcggacgcgcgaatgcgttcgcgctttgatgacacaacctgtggggtgaaagatgatggatgacatcacgataaagacggcgcttgtcgctcgaacctatctctaccgcattttccagatgacgctcggggatgatccgacggaggaactgctttccacgatgttctccgatacaaccaaggaggcgctcgactgtttcgggggcgccgaatccgacgtttacgcccgcgcatgcgctgatttagggcaatgcagagcggcatacgagcaggaccgggcatcgtatctcgaaaaggcgaagcgcgactacatgcatgtgctcgtcgggccgcacgagctgaaggccccgccgtgggagtgcgtctatctcacgaacgagcgggtgctgttccaggaggcgacgcttaaggtacgcgaagcgtaccgcggcgagaacatgctgccctcccaataccctcacgtgtccgacgatcacattgccatcgagctcgatttcatggtgaagctgagcgaaaaagtccaggcggcgttcgaggcgggcgataccgcagaataccgaaggctgctcgaggcgcagcggacgtttctgacggagcatccccttgcctggatcgatcggtatgcggccgatcttggcgaggatgcacccggctcgctttacagctgcatcggcatgctgtgcgcagcgtttctgccaatcgatgttgaggtgatcggcgagctgctcgagggaagcgaaggggagtaggccgcaccgcgcccgctgaagcggtgcgggtgcgggtgcaagcgtttgcgaggaacgggggcgagcgaatccgatgaagaagatgaagcttcgaggcaagacgacgatcgtcttgatcgtgctgctggtcgtgtccgttgccctcaacgttgtatggagcgactctactcagcgcgaacaggccgaagccgaaatgctcgaaaaggcccgcatcctttcttacgagatggatgcggtatgggaattcatggatatgaaccaggcgcgcatcgacaccgattccgacggatcgtacaacttcaaggggctctactgcgccatcgccggcaagagcatcgccaagattctcgagcgcgataccaattacgtcatccgctatacgaacctcgaaccgcgcaaaaaggcttcgatgtccgatgattacgaatcagaagcgatcaggctgttcaacgacggttccgccgttgaaaagtacggaatcgaaacctacaacggccaagaggtttttcgttacgtgacgcccatctatctggaggagtcgtgtctcgattgtcacggtgaccccgcgggcgaactcgatgtcacgggatatcccaaagaaggcatggaggtcggcgatcttatcggcgtgacgagcattatcatgcccatcgatatctacatggcgggcatccaggaaaacgtaacgcgtcaggtcgggtacttctcgtttatcatcgtcatggtcattctggccgtctacgtgcttatcacgcgcctgatcacgaggccgttgtctgaggtggaaaacgcggtcggtcaaatcgagaacggcaatttcgaagtcaacctcgaaggcatcaagggcaacggcgaaatcaaggatctggccgtgaagttcgatatcatggccgaacagttgcgtgcgctgtacggaaacctcgagagccaggtagagttgaggacggctcagctcgaatcggcgaacgagcttctcgagaagcagcgcagccagctcgctcgggtgaacgaggaactgcaggctgagaaccagtacaaatccgatttccttgccatcatgagccatgagctgcgcacgccgctcacctcgatcatcgcgttcaccgaaatatggcagcaggcgaatgtcgataggtccgaggatgaaaccgcggcggtcaaggaagtgaaggaaaacggtcaactgctgctgcagatggtgaacaacatcctcgaaatggcccgagtcgaagcgggcagaaacgagctttcggtcgagccgttcgacatgatggatcttatcggccttgtcgaacggagcatcggctttttggccgagcagcgcaacatctcgctggcgacggtcgttcatcaagacgtgccgatcatcacggcggattgggagaagattcgccgtatcgtcgagaatcttgcctctaatgcaataaagttcacgcgcaaggggggaagcgttagcatcgaggtgagctatcacgaagagacggagcgtctttccatcgcggtatccgataccggcatcggcatcaaggaagaggatccctcgcttatattcgagcggtttacgcaaagcgacaagtcgtcgtatcgccgttacgggggcagcggcctcgggctcgccgttgtgaaggagcttgttgaaatgcacggcggaaccgtcgaggtgcggagtgtatacaaacagggaagcacctttaccgtttggattccgacgggaaacgacaggaggtaggttgggcatggcgaagataatgcttgccgacgatgaaccgagcatgcaaaaccttatccggcgcattgtgcaaggaggcggctacgggttctgctgtgcagccgatggcgaagaggcgatcgacgtgtaccagcgcgagcaacccgatctcgttatcctcgacgtcatgatgccgaagctcgacggatttcaggtgtgtcaggagctgcgcggcaggggagccatcgtgcccatcgtgttcttgacggcgaagggggacattaccgacaaaggaacgggcttcaacgtgggtggcgacgactatctcgtgaaaccgttcgaccccgatgagctgttgcttcgcatcgatgcgcacctcaagcgcaacgagcgcattatgcccaaacagcaggaagactgcgtcatgctgggcgatttggaattcgataccaagcgctaccgcgttaccatcgaaggaaagcggatcgattttactcccaaggagttccagatactctttctgctcgcaagccatcctggcgaggcattcacccgagagcagcttatcgaggcggtgtggggagaggagttcgtgggcgagacgtcgagcctgcccgttttcattcgcaagatcagggagaagatcgagaaggatccatcgcaccccgaacgtttgcaaaccgcatggcgttcgggctatcggttcggaagctaacgatgcgcggcgcccgtttccaggcgccgcgcatcgcgatcggttgcgcgttttcgagtgccgtttcgcgctttctagcgatcggtcaatgcgtcgatcggcgggatatcccagttgtcatcggcaagacgcggctccatgtgatcctcgtcgccagccgatttgaggcggctgaagtaatccttcgtctccttcaccaccacgcccgatagcgcgatgagcgcgatcatgttcgggatggccatcagcccgttgaagatgtcggcgatggtccacacagcggcaaccgtcatgtaggggccgatgaacacggcagcaatgtagagccagcgatacaccttgaccgatttcatgttgccgttgctgaagtactcaaggcagcgctcgccatagtaatcccagcccaggatggtcgtgaatccaaagagcacgaggcaggccatgagcacgaacgaaacgacttcgccgggaatgaacggcaagcccgcctggaacgccgcgctcgtgacagcggcgccttcgaggccggggatctggtaggcgcccgtcatgacgagggcgaggccggtcatcgagcagaccacaatggtgtcgaggaaggtgccggtcatggaaacgagaccctggcgcaccggctccttggtctgagcggctgctgcggcgatcggggcggagccaagacccgcttcgttcgagaagataccgcgtgcgatgcccttctgcatggcgacgatgatcgcgccgagcatgccgccggcgacggcctgcaggccgaaggcgctttcgatgatggtgacgaacgctccgggcagcttgtcgaggttcgtgaggatgagcacgagcgagaatccgacgtaaagcacgaccattgcgggaatgacgcgctccgatactttggcgatgcgcttcagcccgccgatgaccacaaggcctacgagcacggcgagcacaagcgagccgatgacagtggcgatggagtagtccatgccgagaatgctgacggtcatcgatttgttgggatcgaagaagccggtgatggctcctgaaatggagttgacctgcgtaaacgtaccaatgccgaacaagcctacgcacatgccgaagaacgcgaagatcttcgcgagccagcgccagttcttgcccatgccgcgctcgatgtaatagaagggtccgccgagcacatgcccggtcttcttatcgacgctgcggtacttgacggcgagcaggccttcggaaaatttggttgccatgccgaacagcgctgccagccacatccagaacatagcaccgggcccgcctgccacgatagccgtggcaacgccgacgatgttgccggttccgatggtggctgaaagtgcggtgcacagcgcgccgaagctcgtgacttcgccttcgcctcccgtttcgttctttaccatgtagcgcagcgcccgggggagctggcggaactggacgccgcgcaagcgcaccgttaggaggatgccgccgaacaggatgagcaccatgagcggtatgccccagataaagtcgtcgatagcgacgagcgccgagttgatcgtgtcgaaaaagccttccactggttttccttccttcatgcatatatgttgctgcaccaggcgaaacccgaagatattcaattggcctaggaaaacaagggaaagcgcgaacgcgtgaacgcacgaggcgaatgcacgcgacaagctaaaagctttgctctgtcctttggcctgagagtttcggcttttcagccttgccccttcggcatccgatctggtggtcggaattctccagaggccccttctcgccctgtctcattcgattcaggacgtatcaacggggtgacgctatataattgtgcaggcgaattgtagcaggtaaacgattagttgtgaatgcttatttaatcatttcggggtgaatgcctccagctgtcatgcaatcgcccgctcgggccgcatttcggccgcgtgatggtttaccatggaaaaaggcgcttatcgggtgctgtaggtgggtggcgtcaggagttatcgcatgaatctgtctgaatacaaaaccgcgtttgacgaggtggctgctgattacgagcgaaccgtttcggatttcggcctcgccttcgagggggaggagtcgcagcctcggcgttcgcgcttcgggaatgcggcgtgggcatgcgagaattgcggcaagagcttgcgcgggggaaacggatgggtatcgcccggctgcctggcttgccggactggcgagaggaccgttaccttcttcatttccctcaagtgcccgaagaattgctatttctgcttcaatcccaatcaggaagactacgagttgtatcgccgagagtgccgcgatgcggctggcgagctcgagcaggctcatgcggcgggtgccgcgttcgattgcatcgctttgaccggaggcgagccgctcctgcatttcgatgaaacgcgtgcgtttttcgagaaagctcgcgatctgtacccgaatgcgcatacccgtctgtatacgagcggtttcgagcttgacgctgcgagaatggatgctctttgcgagagcggcttgcgcgagatcaggttcagcatcaagctcgaagacagcgaagccgagcgtcgcgcggtggaagaacgcatgcggatcgccgtcgatcatattcccgatgtcatggtggagatgcccgtcatacccggtacgctcgacgagatgagggagctgctcgagaagcttgcagcatggggtctcaagggcatcaatctcttggagttttgctttccgctcggcaatgccgaagctttcaaggagcgcggtttcacgctgcgcaagcagccgttcgatgtcctgtacaactactggtatgcgggtgggattcccgtcgccggcagcgaagcggaggcgcttgagcttttgcggtacgcaaaggagcgcggtctcgatatcggcgttcactattgctcatccgacaataagaataccggacagctgtaccagcagaacagcgtgttgccgcgcatgcaggcggcaacgggacgctatcgggcgtatcgattcgatggggacgattatcttatcaagtgcgctaaggcattcggaacggatgttgcgcgcgtaggcgaggcgcttgaaaagctcgcacagatccaggggggaatcgagtggtcggtcgaaaacggggtgatcgcgtttccggataggctcatcgacgacgtgtgtgcctgtgtgcccgatgtggagatcggtgtaagcctcaacgtgctcgagccggctttcgaaggtgcgaatatgcgcgaagtgggtatcgtttcgggttcgtaagccgtatgggcgcttcgtttggcgccgctggggttcgggcgctctttatccatatgcaaaaatgatcgggatcctgtggagccggagtggggtcttcgtgagacgctatacatatgtatgtataggcacgtacaataagcgcagatcaggaaccctactcaatttgcacgacaagaaatcgaacctcgaactttgaaaatcagtagttttcaggataggcgaaacggagctttcagggcactatactccacatgctcggtcaagcgatcgggcacgagccgaaagcgatgcgagtgataagcatcgactaagcaaatcgaaattgcagcaacgaaaacaaaggcgcggctgcgaaagagaaagtgtttggaggcacaaaaatgaaaattctcggcatgggtgttcccgagctccttattatcctggcagtcgtgttgctcatcttcggaccgaagcatcttccgaagctcggtgctgcagttgggtcgacggtgaagaaccttcgcgaaggtctcggcagcgacaagaagatcgaagaagccgaagacgagatcatcgagatggaagaagaggaggagcttgaagaggctcctgcgaagaaaaccgtcaaagcaacgactaccaaaaaagttgcagccaagaaagccgtggttgccgactaacgtttgaaaaccctccttatggttagtcccgcaccctcgcgggacaatatcagccgatgcgcccgcactgcatcccttccctccctcagtgccggcgcatcggtttctttttttcttagcccaattgagtgactgctgatttttcccaatgcgattcgatagctgttgatctgcctttctcgccgatgcgcatgctttttcccgacaggagtttctcgatctgatcgatgaaagcgcgtgaaggcttcttgcgggcacgggcgttgtcttgtttcccgatggagacgggtcgcattggggcttgcggctgttgacccgcctcgtgggtaccgctacaattcctcgctgctatgacatcgtttgagcttattgcagcatatcggcgcgaccgcgtccgcgattcgttcgcgggagagccgcttgtgctcgttgccgtatgcgagcaccccttgtcctcgatgcttatctgaggaaaccttccgtttatccagcctatacgtttctgcgcacctgccgtgtgcggcgctttgtcgcccgcggttgcttgcgcttctgcatttccggaggttttctttcatgtcccatagttcaaaccaatcgcccgccgccgttccgagtgtgacgaaggagcagatcgtcatagtcggcgtggtggtgttcggtgcgtttctcgctctgctcaaccagaccgtcatgtcgcctgcgcttcccatcatcatgaccgatttcggcatcgatgcgacgacggctcaatggatcatgtcggtctatccgcttgtcagcggaatcatggtgcctgtctcgggctttctgatcgaccgtttccccacgcgttcgctgttttttgcgtcgatcatcgtgttcatggggggcacgctcgcgtgcgctctggctcccggtttcgaggttttgctgctcgggcgcgtgctgcaagctgcaggttcgggcgtgctgctgccgcttgtggccgtcgtgccgatgatcgtgtttccgaaggagcggcgtggaacggccatggggttggcgggcatcgtcatggctgcggggcctgcggttggtcccgtggttggcggcgccatcatcgattccttcggatggcgtgcggtgcttggatgcatcgttccgcttgcggcgatcgttctcgtgtgcggcatcgtgatgctcaaaaacgtcggcgagctgaagcatccgcggctcgacatcgtttccgttgttctatcgactgtggcgttcggcgggctactctacggattttccaacgcttcgtcgttcggctgggtgagcgttgcggttttggctcccgttgcggcgggcgtgctggcgcttgtcgcgtttgttcggaggcagaatcggctcgaggagccgctgcttcgcatccagaccctcaagacgcccgatttccgcatcgcggccatagtggtgacgctcatcaacgcatcggcgctcgtcaccaacaccacgctgcccatcctgctgcagactgccctgggggcaagcgctatggataccgggcttgtgatgctgcccgctgcacttgcgggactcgtcgtgagcccgctttccggcattgcgttcgacaggttcggaccgcgtgccatgtccattgcggggatggcgatgatggttggatcgatgctcgcgctttcgcaggtgggcaccggcgcttctttggcagtcgttgcggcgctgtgcgcggtgcaggcgtgcggacagggacttgccaacatgccggtcaacacgtggggcgtgaatgcgctgcaaaacgacctgatcgcgcacggaaacgccatcgccaatacgggccgtcaggttgcgggaggcttggctacggcgctcatcgtcacgcttatgaccagcgttaccgcgtccaatgcggcaaacgggcttcaggtgtccaccgcgcaaggggtgggtgcggcgtaccttgcgtgcgcgagtatcgcggcggtcgcacttgtactgtgcattgccaaagtgcgcagccccaagaagaaacaagcgtaggatcggcctcttatccaaggttagcgtttaaccttggataagcgagcttgtagtacagggacgcgccgcatgcggcgcgagaaggaaagcggccattcggatatggggccaccgctgaagcgacggcccccgatagcttgctgcgagcggttttacgccttcactgcctttgcagcttcttcacctgcgatcaggcctgatccaactgcgaaaccgttagcagatcctgccgcatagtagggagatgtgaacagatccgcatcggcaccggccacgaacaacccgtcgatgaccttgttgtcgggatcaactgcctggcagcgggcattgcacttgattcctccgagcgagagccatcctgcgggcatcgactcgacgatgtagaacggaccctcctttacgggcgtcaggtacttcgcgtctttgaagaacagctcgtcagcgcctttgtcgcagtattcattgtactgggcgacggtttgctcgaggttcgaaagcccgaagtgctcggcgagctcggcaagcgtgtcagccttgaaggcccagccttcgtcaaccgccttatcgaactgctcgcgaatgtcgcttgccacgatatcggcgaacatgcccttcatgcgctcgtcgccgagaaacgtcggcaagggctcggtttcccagcgcttcatgaaggcctcgtcgcataccgcgtagtaatacgattcccgcacgagcggctcgcaacagaacatcgtcttctcgcacatgactccctcgtttacgaagcgctcgccgctcccatcgagaaggatgccgccgaatacgggaaggcgcatggcttcgttggttcccgaagtgggtctgaacgagtaggtgggggatgccttcgtgttcgcaccgccgtactcgttcatcgagatgctgaagcacttcccaagttgggctcctgccgacatggccatgttgatgcctgcgcctgtgttgagcatgttgcccatgcagacgatcttcgcacctgcgaaatgcttggcggtttcctcttcgcttcccaagaagcctcccgttgcgaggatgacggccttggctttgatgtcgatgacgtctttacccgatacgcactgcacgcccgccaccttgccattttcgatgatgaggctttcagctgtggtgttgaacaggcattcgactcccgcttcgtcgacgatcttggtgaagtattcggcacgttcttcgccggcgacgccgtacacgcagcctccgcgcaccatcatcgcgtccgctttggtgctgttggtgaaatcgacgttgaacggcatgcctgcatcaacgaatacgtcgaccgccttgcccgacgcttcgatgatggctcggagcgccttgttgttcgattggtagttcgtgcccgtgtttacatagtccatgaattcttcgatggtgagcggttcgggactcggatcctgcagcgatgatccgactgcgaacgctgccgaggttcgcgtattggtcgttccatccatggatgcggcggcgtctatggcgatgaccgagcagccttccgtcgccgcgccataggcggcaagcaggccggcggcgccaaggcccgcaacgacgacgtcggcttctttggtctgagtcgcctcttttaaagacggctcctccgccgttgcctccgccgggctttccgcgctcgggctgcaagcggaaagcattcccgctcccagcactcctgcggctgcaacgctcgagccgagaagaaaattccttcgagtgagttctttcatcgtttctcccttccttgaaaacaggtatgcggtttcattccgcatgtcgaagaccttacgaagcaggggctttgcctgaatcagatttaaaatctgatttctcgcgatgcgtcatcgttacaatcgtattctctcgaaattgctatgatgatagctgtcggatacggaagggaggccgatggctgcggggggaagcaaagctcagggctctggtgggggctggttcgtcgcggcgacgatcggcttggccctgtgcatcgccggcaccgaatatgagcgctatacggcgttatgggtattcgaaacccgatccgttgcggaacttgcatcgatcgtcttgttcatcgcggcggttctcgccgtgctcgcgaatcggacgcttcggcgaaaagagcgcttctatcgaaacaagccgtttcttgcagtgcttgccgcggttcagacggcgggccttgcgggtcgctgtgcacaggcgatggggatcgcattcagcgagccgatttcgatcgccgtctccgtggcgatgcattgtgcgagcattctgttcgtcgtgtatgccgaattctttctcgatgtcggcgttcgaaaggcggtgagcgcttttgcgttcggcattgcgggcgcaggcgtgctgcagattctcgttctcgccttcgagtggcaggtggccgtcggggcgcttgtgctgttcgttcccggttcggtggggctgcttatgtggtcggacgcccagtacctcgatggcatgtgcgaggtcgagcgcgaggacatcgcggccgaagtgcgcgacagcgaaggcttcgcccgtgattttcccttctgggaatactgcatcagcatcgcgctgttggaagttctgctcatcgccttgcatagcacggttatggtgacgcaggatagcggcgatgcttcgttcgttattcaggtgacgtcgggcatcggcacgcttatcgccggcgccgttttctatgcgctggttcgataccttcaggagaccgagttccttgagctgctgcgcattctcgtgttgccgctcgtgcttgtcgggctttacgtttcggcattgttcggagcatcgggcgtccccctctaccttgtcccgcttgccgtggcgtattccattctgcttctgttcgtatggacggtgccccgcaactaccgcaaggggaacaccccgttcgtttttacgtgcatcgcctatttctcctatcgcgcgggttgggcgctcggcgtttacggaatcatgattctgcccgatcgcttcggagatctgctgggaacggccatcgtcctcgtcgtgttcagcgtgctgctgatttcgagcgctgtccgccttctgcagttccgacgcaacagcgcgcgacgcatcgacaaggcgaaggaggccgctgagctgcaggcgaatacagatatagctttcgccgaagcatgcgcgcgcgtttcccgccggtatcagctgacgcctcgcgagggcgaggtgctggttcttctcgcaaggggccgaaacgctcggcatatcgcggaggcgcttgtgatttccgatggaaccgcccgcacccacatcatgcacatttaccagaagatggagctcaactcgcagcaggtgctcatggatatcgtcgatgccgagctgagggaagtgatgggggaagttcagtgaggtcgggttttgcgctttgcggtttggcaaggtagctggaattggggtcgcaaggcgcaaaggcttcgggcgcgtagcgcgaagaggcgtttcggatgtttcatgggcgccgctaaacgtggagccgttgtcggtttgccgccaagctctctgatgcgaaaccaactcctgttatcatgatttccgaggacgaacgcgatgcaggcaggagggatgcaatgaatcaaccagcgcaagcagctgggaatctgtcgctgcgccgcatcattgggttcgcctgcaatcaggggttcgtattctttcttttctacatgggctcgaaccgggccattcctatggggtcgttcaagttcgagcgcgccgagctgttcgggacgcttttgttcatggtggtcggctttgttcttctcagactcgtaacgccgagcttccgcaacaagatcctcgcccgtccgatgctgcttgtgtatgcggcgatgggcgtggccggctcgttcattccgttgttccttgggtcgccgtcggcttactggcttcccttcgagggtgcgctgatcggccttccgtgcgcgctgctgctcgccgcgtggggaagggagttcggcgagaccacaaccaaggtatcggcacctgaggtgttcgtcgcttcggcggtaggcgctcttgtcggtctcatcgtgtcgcttatcccgatcgaggggtcgtcgctggtgctccacctgcttcccttcggaagtgctgcggcgctcatgatggcgccgaagcccgctggcggcgtttcgccgtcggcccgcatcgaggcggctgcaggatcggaggccgcaaaggatacggtgctgctatcggcgaagattatggcgggcacggctctgttcggcatggcggcgggcttcatggaaacgttcaacaccgatccgggcactgcggctatggcgtcgtatccggtaagcctcctcttgttcggcgctttcgcactgggtacgctgtcgcttctgcgctccgacgggttcggccgcggagcttcgcttaacaaggcgtatcgcttggcgctgttcatcatgatgactggctacctgctcattcccgtccctcagttcgccgagtcgctcgtgcctggcgaggccatcgttttggcgggctatctggggctttctgccgtgctcatctctctgttcctcgtgctcgcgaagctgacgggctccgatgcggcgatgtcgttctcgcgggggtttgtggcgctgtttgcaggcgagcttatcggcgtggcgatcgcgaacgcgttcgactacgcgcagcccggctacgtgacgccgtattcggttgtggtgttcgccggcatccttgttttgttctcctacgtgttcttgttcaccgagcgcgatttcgggagtctatccgaaatcgtgacgaaaaccgactccctcgaagactcttgcgccgcgattgccagggagtacggcttgtccgaccgcgagggggagattcttcccttcgcccttaagggtcgcacgagcgaacgcatctcccaggaactgcatatatcgaagagcacggtcgatacccatctgcgccgcatctacgccaaggcgggcgttcacagtcgccaagagctcatcgacttgagcgaggagaaacgcgggtaggctttcggttgagtgcgggtatggtgctgggtatgtacgcgcggcgctttatgggatgcgtttgcttgccaggggcgctgcggcgaaggtctgcgcgcgcgattgccctgcgcgggtcgcgcacgttcgcttggagtaagccgtgcgcatcgcacagattgtgcgaactgcgcaaattgcgagccggatcgtcgattttcgccgaaaagaaccgatctgaagctctatggaatatcttattttttcgagtgtcgaaagcgttgtttttcgtcgtaggaatccccagctcacagggtcggcttccttgcgttttcccggtggatcgccaggaggtgcgcaaaaacgcctttccgttcggcgaatcaccttcagatcggtctttttcggcgaaaattcaaggtttggcctataaaagcgggatttgccctacggcgggctcgtctgcgcgattgcgcaagagaactgtgccgaaaggcctgacgcgaaggcgagtcgtgtcgaaaggagcaacgcgaagggtaaactaagggtaatcaacccttaactcgaaaaacaggccagtcgcttcacgcggctggcctgcgagtttctggtgcccccgataggattcgaacctacggcactcggtttaggaaaccgatgctctatcccctgagctacggaggcattgtgcgagaagtattctaccattaaccgtacgattgcgggagatggtcgaagatgaacacatcgcacgaagcggaaacgcgaagcgggctgcaatgaaggcgcaacacagcggcggtgcgaatcggcctgcacgaaaggctgcgatagagggcatcgggccgggtggtttgcggccaagcgcgcaaccgtccaagcgcaggacccgatcgtctgcgcgatcgtcgtgcgggcggtgccttaacgagaaaggcgaaccgcattgcgattcgcctttcaggtgctctgtctttgcttttgctcgttactgccccgctgttggagtggtgttgccgtctgttccaccgccatcgggatcggacggcgtcggaggcgctgccttggctttgaacgttacggtgacggcgatatcgttggttacattttccacggtgaacgtgttgttcgacgagagcgaatagcttttgccgttggtgtcggttatcgaggagacttcgtagccgtcgttgatgctgacggtgaacgtgacgctctttccgctgtcaacgttcatcgatccggggctgacgctgccgccgttgccgctggtcgaagccgaaacggagtagctcgacggtgcgggtttcccggtgctgatggtgatgttgacggtcgtgtccttcgcaacgctcgatccttggctcgggttctggctgatgacgagaccttcttctacgctatcgcttgtcgcggtactcgttgttaccttgagccctgcgcgctcgagctccgctcgggcatcgctttcgctgtatccccgcacatcgggcacctcgacgttgcccttgccgagcgatacgatataggtgacggtgtcgcctttcgccgctttctcgccggctacggggtcttggctgatgatatggtctttctcgatatcgtcgctgttcgagggcgtgccggccttgccttcgagcccggcttccttcagcagcttttcggcttcttcgcgcgttttgttcttaagatcgggaaccgtgacttcttcagctcccttggataccaccaggttgacagtcgagcccttctcgcgtttcgttccggcttccggatcggtgttcaccacgttgcccgacgctatctcgtcatcgaagatctcggtggtcttgccgactttgaacccggcatcctcgaggatctgcgtggcttcggcgacggatttgtccttcacattggggatgggatcgcccgaggcgaacgcgcccgagaaggcgagcacggcagcggcgatcaccacgatcgccgcaacggccgccacggcgatgccgatggtcttcttgttgttcttgggttttccggtgtcggacgcgcggtagttcgattgcgtggtgacgggcttcaccccgccgttgcccgcggcgggcataacggccgtcccgtcggccattgccgctgcgcccatgccggctcccgccatgccgccgatgacggcggtctctgcggcaccgaagccgctgccgagcgccacagggcgtccagcgaggtaatcgttcaacgcctgcttcatatcgtttgccgtggcgaagcgctcgagcgggttcttcgcaagcgccttcatgatgatggcctcaagcgtgggatcgatatcggggttgatctcatgcgggaaagcgggcagatcgttgacctgcttcatagctacgctgaccgcatcggggccgtcgaaggggagtcgtccggttgcggcctcgtacagtacgatgccgagcgaatagatgtcgcttgtggcggtaagctctttgccctgcgcctgttcgggcgagatgtagtgcgccgtgccgagaaccgaggaggtttgggttttcacggagttcttcgcacgggcgatgccgaaatccatgaccttcacgttgccgtcgggctggaccatgatgttctgcggcttgatatcgcgatggatgatgtcgagcttgtgcgccacgctcaatgcctggcatacctgcgagccgatttcggccactttgcgctggttgatggcgccgcgctcgttgatggcggtcttcaaatcgctgccgcgaacgtattccatgacgatgtagtacgtatcgtcgtcatgtccccagtcgtaaacgttcacgatataggggctctgcaagttggccgccgccgcggcctcctgcttgaaccgctgggtgaagctcgggtcggccgcatattggggcagcatcgttttgacggcgacgagtcggccgagcacgttatcctgtgcacggtacacttcggccatgccgccgataccgatgcgctcggttatctggtagcggttattgaaaaccttgcctatcatggttccggtcacgttttagctcctcttggtcacatgcgttcggcgattggtcgtattatcgccaacagcataccgtatttacaaaaggccttgcacttccaaagccgttcttaacacattttgcgctttcagcgcggcatccctctccgagctctcctctatcacgatagcgacgacgacgcgcggattgtcggcgggcgcaaacccgatgaaccagctgtcgtcgagctccttgcccgtctccgccgtacctgttttgccggctacgtcgatgcccgagatggcggctgcggtgccggtgccctcctgcacgacgcccaccatgatgtcggttacgcggttggcgatctccttggagatcgggcgcgagtattctttcgaggaagccgtgaagctcttctcgccgttggcgttgtagatgctgtcgacgatatagggcgtttggatggagccgtcgttggctatcgcgctggcaaccatggccatttgaagggcggaagcctgaggccccggctcgcttttctgcgctgcgtcgcctcccgtgacaggttgcccgtcggcggcccaagccgtttcccattcggacatctcggcgggatcggccatcaccgattcgacaagcggcagatcgaatgagatgaggtcgttgaaaccgtatccctcggcggcggaaacgagcttgtcggctccgatctggacgccgacttggccgaatactacattcgaagacacctcggtggcgcgggcgagcgtgatatcgccgtaatcgatgtcgccgtagttcgacaccttggcaccgccgatgtccatgctcgaaggcgagctgtacacgctgtcttcggttgccacgccgtcgctcagcgcggttgcgagggtgagcaccttgaacgtggatcccggtgcgtagagcgcttgggtggcgcggttgatgagcgcgctcgatcccgaagaatcgccctgctcgagcagggtctccacatcggccgcatcgtaggtgggtgccgatgccatgccgagcaccgcacccgtttcagggtcgagcaccacgcatgcgccggcagaatcgccgagggcgtcttgcgccgcctgctggattttggaattgagcgtgagcgtcacgtcgtttccgggtgtgttgatgccgcttgcggcgttgatcacgtcggttaaggtggcgaaattctgctgccccttgagcgttgagttataggcggcttcgatgccgcttgtgccgtattgctgcgaatagtagccgacgatatggcttgcgagcgtgcccgccgggtagacgcgatcgtacgtgccgttgtcgtttttcacgctttgggccaagacgacgccgtcgtaggttgagatggtaccgcgttcggtttgcgcttcgcgcgccatggtgtggttgttgccgggaaggttcttgtagtagtcggcctgcacgaccatgatgacggtaaggctggcaacgagcagggcgaacagcacggcgaaaatgcgcatgcaattggtgagacgctttccgagcgatacgcgcccgagtacgctgttcgggttgaacgaggcggtgcccgttttcatctcggtgcccacgcccgtgccctcgtcgccgcatcgaagcagaaacccgacgatgatgaagcctgccagaagagaggagccgccctggcttacgaagggcagcgtgatgccggtgagcgggatgaggcgcgtgatgccgccgacgatgatgaacgcctgcagcacgatgatcgaggtgaggcccacggcgatgaacgagctcacatcgcttttggcgcgtgcagcagtgacgatgccgcggatagcgaagcatagatacagaagaaggatgcccgcagcgcccaaaagccccgtctcttcggatatggcggtgaagatgaagtcgctctcgacgacgggaaggcgaccgaacccgtcgaggccgcctgccatgccgcgtccgatgcccacgccgaacagatcgccatcggccatcgagtagatcgattggacgagctggtagcctttgccgctcgggtctgcgaacggatcgagccagatatcgacgcggtcctgcacatgcgagaagagcgaccaggccgccaccgcgccgagtgcgatgaggaggccgcccacgacgagatagaacttcttccctgtggctacgtagagcatgatgaggaagatgaagaagaacagaagcgcgctgccgaggtctttctcgaagactacgatgagcaacgcgacgatccacataaggatcagtggcagaagggtgcggatgtcgggcaggttgagggggccgacgcgccacgtgaacaccgaaagcatctcgcggttctgtgcgaggtagcccgctaggaacaagacgatgacgatcttggcaatctcgcccggctggaacgagaacacgccgccgatgttcagccagatgcggctgccgtagatctcttggccgagcccggggatgagcggcgagagcaacagcgcgaagccgatgatcatgaacgtgtacttgtagttggcgatcttgtcgaggttctttatgaacgcaagcacgagcaccatgcaaacaacgccgagaaacagccacatgacctggttggttgccatattgggcgaatcggaatacggtgcgatgcgcgtgacgaacgcgatgccgatgcctgaaagcgcgaatacgacgggcaggagcgcgggatcggctcccggggcgaacttgcgaaccgccaagtgcgcgatgatgaacgccgcgaagatgccgatgggcacgccgagcgtgttcatgttgagcgattgcccctggttgatcgcgatcatcgcgaacatgagcaccacgatgggcgccgcaacgcagagcaggataagttctatgttgcgtctggtcatcggttcgccgagcctcccgacgagctgttggtcgaacccgccttcttgtcggcatcagccgaagcgccggcatcttcgccgtttttcgcatcgccgctttcgcgggaggcgtcgtttttcgcctcgatctccgcttcgtactcctcgataagggcgttggctgcttcgacgttgtcgacgcggatgccgtcggaaagcctgttcgccacgccgggttgcagatcggatatcgaaacatcggttgtgtggtcgagttcgttgaactgaatgccgaacagggttccgggtatgccccggtatacggctaccttgccgttctcgtcggtcaggtaggcgaccgtgttggcgtacgagcggaatccaaaaaacgcgccagcgcacacgagcacgagcgcaagcagcgtgatgaccatcgaaagcttcaccttgcgtgcagagcgcttctgcttgacttcgccttggcccgttacgtcgacgacgatggtggtggtgttgtcgtagccaccggcgccgttcgcttcgctcacgagtgtgctcgcgcagcgttggggatcgttgatgcgtccgaggatatcctcgatcgcgttgtcttcgagcatggtggttaggccgtccgagcagatgagaagtctgtctcccgattcgacgttgagctcgtaaagatcggccgccatgtgcggatcgcttccgagcgcacgggttatgaccgagcgattggggtggtagcgcgcctcttcggcggtgagctggcccgcttcgatcatatccgccatgaggctgtgatcgcgggtgagttgctggagttttcccttatggagcagatatgcgcgcgaatcgcccacctgggcgagcacgagccgctcgccttcgaggatggctgcggtcatggtgcagcccatgccttcgcgcccgacgccttctttgacgccgcggatgacggctcggttcgcttccgctacggcgaagccgagcgtttcgctgtccgcatgatcgggagcgtattcggcgagcgtgttgacggcgatttcggaagcgatttcgcctgccgcatgtccgcccatgccgtcggcgacggcgaacaggggaggcgcgactatgaggctgtcctcgttgtggtcgcgcacgcatccgatatcggtgcggcttccgaagttgggatgatccgaggacttggctgccattaggcgtacctcaccttaatcgcaacgtcgcctacgttgacgacgtcgttgttcctgagggcggtcggctcggtgatgagctgtccgtttacggcggtgccgttcgtcgagccgagatcttcgatgaagaggttctggcccatgagcgtgaagcgggcgtggcgtcccgatacgtagccggcgccgatgactatgtccgatccgggattgcggccgacgatgaccggtccgtgaaccgcgatctggattccgcgaagctctttgggaccgcgttcaacagagatgctccaggacttttcttttttacgctgaccccgcacaagaccgatgcccgtcctcatgatggcgaacaggaacaggtagaggagggctacgaacaaaagccgcccgatcaacaatgcaacatcaatcacgtgagtatccttatgtccattgtcctaaacgttgtgcgcacggcgcagacccgtctcactgcgatatcgagaacgcgaagttcgtcatgccgatggtaatgcgatcgccgcctcgtaacggttgcgaggtcgtttcgacgccgttcacgtaggtgccgttcgtcgatccgaggtcggtgatcacccagacgccctggggctcgaagcgaagctcggcgtgggtgcggctggcgttgatgtcatcgaccacgatgtcgctcttgcgatcgcggcccagcacgaggcgtgccgtcgccagatcgtaggcgcggttgtcggcaaggttgacaaggcgggcgcgtaccgctccgacactgggcatggaagcagcgttcccgccgcctgctgcgaacacgacggtgtcgggggctcccataggggcgacctggcgtgcgccgtgggcgcctatcgcgccagccgctgcggctccgcccatggcggctccgacggcgcctgccgcgccgacgatgcccgcattggccgcagcgcgttcgtcgaagggcgccgaagcgacggcatggcgatcgtcgtatccgtcgaacccttgcgcttgacctggttcctgatagccgtaatcgctgtaatcgtcttcctcgtaaccatcgtcatagcgatcgttgcgggcgatgggacgagcagctgctccgttttcgcggtagtcgtcgaaatcctgagaatcgaacgtgtactcgccgtagtcgatcgagtaatcgatctcgtcgtcgggcacgtaaggcagcggaggcttgttgtcgggctgggcgtatgcgtcggcgtaaggctgttgctgcggttggacatacggtgccggggcgggtgcggcgtatggatcgagccctcttcccggcgcgtagggatcggccgccgcgacgccctgtgctccgtaaggctgggctgctggctgcgcgtaggcggtagccgctccgcgcacgggtgctccgccgaggccgtagcgctgcatttcctctgcgcgaagctgcgcgatgatgggggcggcgacgggttcggcgatgatatcgaattttccgtgcttgagctcgtcgtccacgatgaagcgcacgagcggttggccgtccatgacgaggccctcgtttgcagcctttgcggcgaggtaggtttcggtttcgccggcgagggtgggatagtatccgaacaggcgctgatcgtcgtcggggttgacgagcaccgtatagagcgtgggggcgtactgcttgcccgcgcccaccatcttttctcggcgcatcatcttttctgcttttttggctatttgcacgggagagataggcgcgtcgaacattttgtcggcggcgccttcgaaggcatcttccatgcggccttcgaatttagagaaaaagcccattgatcctcccttagtgaccagtgcgtttcgggttcggtttcatgtcggttcaaggaaactccatcttgccataaacgcagggcatttgcccatactttacgcaatcgtcatttttatgaaggtgagggaggcgcgctcggcagggcttgtcggcgaagctggcggctgcttcctattcgacctccagcaagtcctccacatcgcaatgcaacgtgcgggacaaccgaacaagggttgcaccctgcgctctgttgatatctttgttcctctgttcgtacagctgaatggagcgcagcccgacgttggcgcgctttgcaagttccgattgcgataatccggctgcatcgcgctgaaggcgcaggcgcgtgtgctcggatgcttgatgcatgcgttgcctgagggtttcactgaatttcgattccggtgcttcgtgaagcgggtaatacatgtcgaccagttcggcgaaagggatcgtttcgaatattcgcttatagggctgccccgtttgagcctggtgcaatccaagcacccaaccgagccaatactccggcgttctgccgaagcggtccgagggttcaacgggtgttggcatgtcgagatacggcatcagcatattgagcagctcgctccctgatcttcctgcaacgtaaacggggttctggagttcgaattgtcgagcaaggccgcttgcgacgaatgcatccgcaacagcttggccttcgattccgcatgcgttcactccgatatcgaagacatctgcgagagccgaagcgatgtcttcccagtaggtttcgtcgccgagggatatgaatgcgtattcgaagcgttccattattatgctcctcttagcagatcgagcatgtaaacgctgctttcactggtatcgcgggctggatttcggtattgggcgcgtgcttgattgtcgcgcgcgcttcgtcgcggatgccaatcagaacccctgacgagctctgcatcgatgaaagacagcgcatcgaaagcccgtttggatctgatcactacctgcttgccgagctcgccaagcaaaagcgcttgttggagttggctaagagagaggcgattgtcgagaaaagcccgtgcgaacgaaaaatacgaatcgtccgcccgatatcccgagacgacatcgaacttggataaatctaccgaataacgatcgagaacgaactccttggcctcggccatgagaggcgtggtcgcgtcgaagcgccggtatttcacaaggacggcaagccaatggaggcaggtgtaggatggatcgttgagattgaggaaggcgagcccggtcgtctgcagcccgtagctgttgacatacccgttttcggttgtcggacaggcccattcgcacgccagctctcttgattcggtgcaatagaatcccagtccgtagtcgtttctgctgtttcctttgccgaacaaaggggtttccactcgtactggcgagccgtggaacagcatcaaggagcgttcggggttttgggtcatcgggcggcctcctttgcgaagctcgaattcctcacatgattatatcactagagtgatacattcagaaacaaaccagagtcttcatatcgatgttcttgttgtgggcgcatccgggcatcgacttttttgctcggaggctcccggtgagcaccgtcgcgcttttcctctgcgtttcatgaaattaaacctgtgaggtttacggccgaatcgggcttcgccgcattttgaccgatggggacaatagccaaaacaccctgtccgccgcatgctttgtccatggccgacgcctctttgtttggcgcgggcaaagacggtagcgagaacgggagaaggaggagacagctatgggagaaatgaaagcaaaacctgctgtgccgcttccaacgctcggcgaaaccaacgatcttggcaagccgtggaagtgggaggaagacggatgcacggtggtgcgcagcgctccgtggtcgccgccggggtgccaccctgtgggatgcggcgttaagctgtacgtcgacgagaacggcaagctcgttaaagtcgagggcgacgagaaccagcagatcacgcagggacgtctttgcgtgagatgcttgacgctcaaggatttcgtgtacaatccgagccgaatcatccaccccatgaagcgcgatccgaaataccgcgggcaagcggacaagtgggagcgctgcacctgggaagaggcgctcgacatcatcgaggacaactaccggcgcattacggctgaatacggttgcgagagcgtcgtgtttttcgtggggacgggtcgcgagggcggaacgctcgggccttacggcacctatatgctcaggtcgccgaacatgtgctatacgcaatcgggctacgcctgctacgtgccgcgcatggctgcggcggcctataacctcggtagcccctatcctgaaatcgactatgcgggcggtttgccggggcgctacgatgatccggcgttcgaaaatcctgaatgtatcatgatctggggcaaagccccgcttgcatctaatccagacgggtttttcgggcatgcggtggtagacatgatgcggcgcggtgcgcgattgatcgtggtagacccccgtattacctggctctcctctcgcgccgactatcacctggcgcttcgggcgggcaccgatacggcgcttgccatggcgatgctcgacaccatcatcaaggaggatctgtacgaccatgacttcgtcgagtactggtgttacggcttcgatcagctggccgagcgcgttgccggcatgccggctgagaaggcgggggagatctgcgggatagatgcggagtacatcaaggaagctgcgcgtatgtacgctaacgcgaagcccgcatcacttcaatgggggcttgctttcgatcagaaggcgaacggcatgcagctttcacacagcgccatctgcctcatggcgatcacaggcaatatcgatgttcccggcgggcagattctcggaaacgcgagttcggggcagaatgaaacgggttttggtttcgaggaagcgctcggaaaggacctcatcagcaagatgatcggcctcaaggagtacccggcgtatgcgaacaccatcttggacgcccatgccgacctgacgctgcaggcgatggagacgggtaagccgtatccgatcaagatgggcttcttcgcgggcaacaacctcatgtcgtgtacctcggccgagccgaagcggtggcacgatgccatgtgcaagacgctcgacttctgcttcacgctcgaatgtttcatgacgccttccgcgcaagcggtatgcgacgtctttcttccccttgcaacggctgcggaggaagacggcgtcgacttcgcccattacggcgcgacgccggttggcacgggattcatgaacaaggcgctttccgtgggcgaatgcaaaacggatatggagacgtgcatggttgtgggcaagcgtctgaacccgcagctgtgggagaactatcacgacgtgtacgatttcatcgacgacttgcggttgcacaaccagcaccatttcaaggaagtctgcaaagaggtgtacgtgcagaaggacgttgaatactacaagtacgagacgggacatttgcgcaaagacggtcaacctggattcaacacgccgacgggtcgcgtggagctgtggtctaccatgttcgcgcaattcggagacgatccgcttccgtattacgaagagccgcagtacagcccgctcaacacgccggagctcttggacgagtacccctacgtgctgacgacgggtgcgcgtgcctatgcgttcttccactccgaaaaccgtcagattccgttctgccgcgagcttaatcccgatccgctcgtcgagatcaaccccaaaactgcggcgaaactcggcatagcccatgggcaatggtgcgaagtgtggaaccagttcggcagcgcgaaactcaaggcaaacgttacgatcgccgtcgatgagaacaccatccatgcgcagcacggctggtggttccccgaagacgatccgaatgaacccaacttgtacggaacgtttcgatcgaacatcaacaacctcgttcccaacttccatttcggtaagctcggcttcggagctcctttcaaatgcctgctgtgcaatatcaagcccttatcggagaactacgacaccgatatgcagctgatttgggagatgttcaaaagagaggatcaatgatggagaacacatacgggcttctgatcgattacgagtactgcaccggttgccagtcgtgcgaggtggcatgcaaggaggagcacaattaccctgtgggcaaatgggggattcgcgtgcatgacgacggcccttgggaaatcgaagagaacatgatcaactggaataagcttccgtttcccactgacctgtgcgacctgtgcgcagtgcgaaccgctgtgggccgcgagccgacgtgcgcgcatcattgcctagcgaacgtgatcgtgtacggaacgattgccgagcttgcgccgaagctcgccgagaagccgaagcaggtgttgtttgtgccccagttcaaacctctcgaggcgcgagggaaattcgagccgaggaacaagctcgtcggcaaagtgcatcatgctgcggcgatcgaggtaacggagaacaagcatttcaccacaagcagtcagcgtagcgatagccgaaccgatgtaggaatcgacgaggcataaggcgaatgcaattcgatcacaggtgcttgtccgggagatgggcaccgagcgaaaggatacgcgatgagacatagcgaatataacgggcacgtcgcgctcgtctactatcgcggcggtgccctcggggaaggtgctatcgaggatcattctcccgaatcgcagaccgctcccgaatgcatactgctggggagcggggaggttcctcgtggcgtgagcgacgttttgtacgacatggagatcggcgaggagcgaacggcggtgattccgtgcgagaaagcatacggatggcatgatccagcgggagtgcaacgctaccctcgttcgttcataccgggtggagataggcttgaaaaaggaaccgttttctcatggaggcaccctgtgtcgggaaaaaacgttcccgttgtatgcatcgaagccgcaaaggatgttgtaaccatcgacttcaaccatttgcttgcgggaaaagacctcgagtattggttcaagctggttgatgtggtggacgatgcgggagtttccatttgcgcatccaaggcgtgaacgaggatgtgttatccatgcacgcagtgcggtgcctgcggaaagtacgaaaacgatcttttcatcttggcgaaagagcctgttgttgcgtgcctgtcgtgcggagcggcgtttaaggcgtctttgggtttgtgtcccgtatgtgctgcgccgctcgtgcgtccaggggttcgggcgcatgcgttatcggtcaaatgtgaaagcagcgtcgatatcgatcggcgctagcccgttgcaacgagcatgcgggcgacgacaattaggaggtatccatcatgtgcttcagacctgcggctgttgagatcaagaaaacctgttcgaaatgcggtgttgaaaacgagtcggcggcaatggtgtgcgtgcaatgcggagcagagctgcccgcgggggctttcggatcccctggcgcaccgggagcaccgggcgcaccgggaacgccaggcgcgccgggagcgccgaaggctccgggggcacctggggcgtcgaaagcgcctggtcggtagcagttctcaatcagagggaaacggggggcttcgcgagtgcgggcctctcgtttttttcatggtggatcgggatgcttgcgggacgtgcctaccgtttcgattcggatgctgtgcgcggatcgtcgatcttgcttgccttgcgcccggcgggagttgcttcgggggcgggcgtttcggtgttttcgaccaggttgatgagctcttgctgagagtgtatgtcgagcttgcgatagatgttatggatatgggctttggcggtgctgttggatataaagaacttctcggcgacgtattgggcgtttctgccacgcactagcatgcggaacacttcttgctggcgggcggtaagctcgtactgctctacaacccgatcgatcttgcgttgccataaggccggacggctttcgttgatcaggaggcttgtgcttgcttcggcgagatcggctatggattcgctgctcgggtagctgtctgagaacacgtagttgctgcaccagatgatgaggagcagcgttacggagcaggtggccgcgagtgccggcatcgtaccttgcgcaaacgcccattcgaatcccaggtaaccgataaacgctcctgagaagtagtaggcgaggctgattccgaatacccaatacggcgatatctggttgaagcgcgccacttcgcccatcgcagaaaagcagacgatggtatcgaaggagaatgcgaggaacagataggcgccgcacagctgctggatccatacgggcacgaacgggagcggcgcgatggcgacgaaggctgcagtggcgaaaagccgcagcagcatgctctccgatactttcttgaatttgaacaaatcgacgaggctcaacaaacctgccaaagcgatgggaagcgcgaaatacaggggcgcagctatggtggggtacgacggtcggacgatgaggcagagagcaatgccccatacgaggccggtaactgctgttgtgaacagcacggttagcgagaaccggtgacttttgcgcgtggcatcgaggctggcaaaagaaaaggtgcccttgttcgttttgagcacgcaaaggtgaagcgctgtgaggatgggcagcaggagcacgactatgaacatggcggcgtcgacgagggtcgcggcgatggcgatgatggcggcgcccatgagaaacgccgcagagagttggcagatccgctcttgatggtcgtagaacgcgaggttcttcccaaggatgaggaaaagcatcacgcagccgagaagggatagcagccctccgagcgcgaaaagaaacggcgcgagcgtcacttcgagcagcagggcgccgagggtgcagagaacgcatgcgataatcgataggcgggcgggaccggctttgtcgagccgatccgccatgtgggcgcaggcgacgaatacggtaacgaaaaggattccgactgcgatggcgtagggaaggtgcattcccgccatctcctcggtatgtctgaaaaacaaaagggcgaaataggagagaaagcatgcggtgccgaaggcgcgctcgaaactccgctggatgttctgtgcgatcatataaccacccccatgatgaatcgtcactataaacattctatccgacgtcggcggaactcggtcgggattcttaatggtatccaccctgattttgctggggttttgccgaattaaacctcagaggtctacggaaaaacatcttgatttttgcgaagcgaccttatcggataatgtcaatttctgctgtgggcgctatctttcaacccatgaaaggcggggggcctgaaggccgttaccgatgggcatatgggtgggcagcgggggtccgtccagtcggttcaggctcgttcccgatggactgaaggaaagcgaggagcaatggcgaactatcaggaattccttgacggaatcgaccgtgctgcctatcacgaaggggagctcacgtgggaggaagacggctacaccgttacgcgtacgtatcaatattcgcctccgggttgccatgacagctgcggcgttctgttctatgcgaaagatggcaagctcgatcacgtggagggcgatccgctgagtccgttcaccaacggaaaactgtgcatgcgctgtctcgatctgcccgagatcgtcaatcatcccgatcgcgttctctatcccatgaagcgtgcaggggaacgcggcgaaaacaagtggcagcgcatcacgtgggacgaagcttacgacatgatcgagtccaaagtgaagagcattcgcgaggagttcggatccgaatccatcgtatgcgtgcacggaacagggaggaacgtgaactggctcgtgccgttgttcgggcaggctgctcttcagacaccgaacatctcgacgctgttcttcacgggttttgcatgctatatgcctcgcgtatgcggtgcgatggcccccctcggcgattttcccatcgccgatgcggcagtggcgcacgaagaccgctatgccgtccaagtttcaaggcccctgaagtcatcgtggtatggggcaatgaaccgcttgcgtcgaatgccgacggctacatcggccattggctcgttcaatgcgtgcagatggggtcgcgtatcatatctatcgatccgcgtcttacctggtggggcgctcgtgctgcctaccatttgcagctgaggcccggaaccgatgccgcgcttgcttgcgcatggcttaacgtcattatctcggagagcctctacgatcacgagttcgtggattgttggacgaccgggcttgacgagctgtgggagggcatcaaggatatgacgccggagtgggcggctcccattacggggctttccgccgaggatatcgcggcttccgcccgtctgtacgcttcgggcaacaacagcgccattcagtgggggctcgcgttcgatcagcagatgagcgccatggccctcaaccttgcggtatgcgaccttatggctatatgcggaaacatcgaccgtcctggcggaaacattctcgtgcgcaattccttcgaaatcaacgcgggatacgcatcgggcgaggatttcacaccgaagtccgctaaagaccgcaagctcaccatcgctcgcggtacgggtatcacgggcggcgagtttatcgcccacgcatgcaccgacggcattctccattgcatcgaggcgggcgagctgcccacaggcgagccgtatcccatcaagatgatctggttccaaagctcgaactcgctcgcatgcgctggcatggacgctccgcgcgactacgaagccttgaagacggttgacttcatcgtgaacgccgaccctattctcacgccgctttcggcggctgtcgcagatctcctgctgcctgttgccatgagctgcgagcgcaattctgctcgcacgtggtggacgccggttcgcacgatctatcgcgccgtggaacctgcgggcgagtcgaagaccgacgagcagatcgtggtagacctgatgccgcggttgaaccctgaggctgcagaggcgttcgggtggacgaaggatactgacattgcggattggtacctggcgggcggcgatggcaagaagcacggtgcgtcgtcaaacgtcaaaggcaacatatccgagaaagcaaaaggcggcgtgggcatgtcgttccaggagctttccgagaaaggcggctatgcgtacgacgattggaaccacacgtacgagaagtacgccaaaggcatgcttcgcgacgatggcaacccgggcttctctacgccgtcgggtcgcatcgagcttgctccgtacacatatcgggtgtggggcttgacgccgacgccatttcataccgaaccgcccgagggtccggtcacgacgcctgaactcatggagcagtacccgctcattctatcgtgcggcgggcgctccttcgagttcttccattccgagcatcgtcagatgcagaccatgcgcgagttccacccgtggccgcttgtcatggtgaaccctgccgatgccgaaaaatacggggttgaggacggacgatgggcgtggatcgagaatggccacggtcgcttcaagcagatcgtcaaggttactccgcgcgttgctcctggcgtcattcatgccgagcacggctggtggttccccgaggaagagggggcagagccgagcctgttcggaacgttcgactccaatccgaacaactgcacccgcgcgttcgagacgggcgagggcggcatcggaacgaatatcaagtcgatgatctgccggatctatccgtttgcggctggcgatgaactgccgggcgagagggttacgcgcaagggcggatggggcgattacaccgtgggtgccatgcgcggcagcaaggtcgactagcaacggttgcgggcgggtacgccgcctgcttggaaagctgccatgtgcggctgatgaggaggatcaatgaagggcattcttatcaactacgagtactgcacgggctgccactcctgcgaggtggcctgcaagaagcgcctggggctgcccgagggggagttcggcataaagctcaccgagaccggcccctgggagtactcgggcaaggcgggcgaggagcgctgggagtggtcgtggctccccgtcctcaccaaggcctgcgacctgtgcgccgaccgcaccgaggcgggcaagatgcccatgtgcgtgcagcactgccaggcctggtgcatgtaccacggcgaggtggaggagctcgcccgcaaggtcgacggcaagacccgctgggcgctgctgacgccgcggacggcgtaaggccacgaacggagctactgcatggagttatgcgcggcagctccggtggacatacccgaatatgtcgaggcatgcaggggaagggggataagagcatgcatgctcattcggatcattgaggtaaggaggttgaaatgaaacaaaaggtatacccttggcttatcgttgttgcgtgggcattcatttccgcgggatcgatcgagctcatcctcatcggcgggtcgaatttcttcaaggccgtctccgacggcatcggttcgccggtcagtgccattgcgcttatgatgaccgtgtgcaccattacgctgacgttcgcggctccgatagccgggcgcttgttcccaaagatcgactcgcgcattctgctgacggccatggctgccatcgtcatcttgggctatgcgcagcttagcttcggccaggcatcgtggcaatggtggctggcgggtcttctgtacggcatcggcggcagcggcatcttcatcatcggcgcccccatcttcatcgcgaactggttccagaagcgcacggggttcgcggtcggtatgtacggcatgctgcttgccatcttatcggccatcctgaatcctgtcatcgccgctgtcattactgcagtgggctggcgcacggcgtatctggccttggcggttgtggcagctgtcctgattcttccgtggacgctgtttgttgtgcgcttcaagcccgagcagctcggtctcaaaccctatggttatgtggagggcgaatcggctgttgcagagaatcaggatgagacgggtcccggcgtcccgtacaaaaaggctctcgtttccgttgcgttcgtcgcagccgtcatcgctgcgggtgccatgtgcaacatgggtggattcaagagcaactggtcgaacatcgcgcagtcggaagcgtgggggtatgtagcgcttcatggggccgattgggctttgatgttcggcgccaccatgatttcctttacgacggctgcgaaattcttcatgccggttataggttgggtcatcgacaagataggcgccataaagacgaacattctcacgttggctctgattctcgttgggttcttggggttgctgttcttccacaacatcgaggcgatcgtgcttgcgtcgtgtttcctgattggctttgagagcgcgaatatgaagatggtaattcctctggtgatacgtgagctcttcggtgcgaaggatcattcgaagatatactcaacagcttacggtatcgcaaactttctcggagcgtttgctacgtcgctgatcgccttcgtcggtgagacgacgggctcgttcgactccatcatggttctgggtgctggacttgcagccgtatccatactggccatcgttatcgcgaaggcgacgtcgaggaagctcgtgtgggaggaatagggtttcctgaagaggtgctttcaggagcctatgccattgtgccgtgagaggtttcgagagtttgagggggtgcgcgggatatgccccgcgcacccatggaaaatcgcgattgtacgaacgagagagcgcctaggggagaaagggcgagttcatggtcgtgtcaacaagcgtacttagcaagcaaaatgttggaattgccgctgcggcgcttttccttctcatttcgcttttcatacccggcagcgatgcgcttcctcgcgagggcgtccttatgctgggggttttcggtatggcggcgatcctgtggatttgcgaatcgcttcccgtgggcataaccggtttgcttgcattgacgctggcaaccgtgctcggcatcgcccctctgaacgaagctttttcagggttcgccacgccgacgatgttttatttgctggcggcgttttcgctttcggcagtattgggtaaaacgagctacggaatgcgccttgtcgtgtttctcatgaagaagacgaagggcgattcgcgtttgatcgtgctggcgttcatggccgccgcagcgcttttgtcgagcgtcatgtccgatacggcggcggttctcatgttcattggctttgcgaaaggcgtactcgatgcgcttgaatgcaagccgaaggaaagcaatttcgggcgttgtctgttcatcgggcttctgtacggctcgatcgtgggcggattcgccacgctggccgggggtccgaacaacatggctgtgctgcagatatcgggcatcagcgtcacgtttttcgactggatgaaggttggcgttcccgtcacgctcgtcacgcttcccgtgtgctggtattcgcttgtgagggtgttcccgcccgagcgcttcccgcgcgagaagatcgacgagatcatcgagaaaaccgagagcgcgggaaagacgaccgtgcaagagcgaaaggctctggcattcgtcgtgcttatgcccgtgctctggattgcgggcaattggatcacggctttgaacgtgacggtggtcgccctgatcggactcgttgcgacgtttcttcccggtgtgaagctgcttacgtggaaggagtaccaggagtcggttccatgggttgttatcgtcatggtgggctcgatcttttccatgagcggtcttatggtcagcacgggcgttatcgatttcatcggatcgatcgtatcggcgacgggcatgtttacgctggcgtttccgttggcgttgcttctgtatctgcttttcgcgtacggcgtgttcacactgtgcccggtcgggggagtatgggaggctctgttcgtgccggtgctggttggcttctgcgttcagtcgggcgtgtcgcctacggttgccccgttcgccatcctgttcgctttcggcgggaactttctgctgccgatcaatcctctcaacatgtactcgtatgcatacgggtacttcaaattcggcgatctattcaaggcgggcatcgtgccagcactgttccttatcgtgttcgacgctttctggacgccgttcatcgttggcgctttgggcatataggcttcgctggcgcgagggctcgacagccagcagtttgctgcgtacgcgggaggggtgagcttatgttggaatctcataaagggggaagcaaggatccgtaatcgctttcgctgcggacgagaattcgacaagacgaaaggaagtggaatgaatggctgattaccaggagttcttggataccatcgatcgtgcggcctatcatgagggcgagtggcaatgggaggaagacggctacaccgtaacgcgcacgtacaactattccgctccagggtgtcacgattcgtgcggcatcttggcttacaccaaagacaacaagctcgtgaaggttgaaggagatccgcttgatccgtgtacgaacggcaagctgtgcatgcgctgtctcaaccttcccgaggcgacgaactatcccgacaggctcaagtatcccatgaagcgcaggcgggaagatcgcggcaacgtggaggcgttcgagcgcatcacgtgggatgaggctctcgatatcatcgaagactggatcaagaccaatatcgacgatgcgggtcttggccgagagtccatcatggtgaaccatgggaccggtcgcaacatcaactatcaggtaccgtttctgggcggtgcgtgcctgcgtacgtccaacgtcggtgcgatcggcttttcgggctattcgtgctatctgccgcgcgtgtgcggaaccgcagcccccatgggcgatttccccatcgtcgatgcatcgatgggccatcccgatcggtatagcaatcctgaatgggtgaaccctgatgttctggtggtgtggggatgcgagccgttacgttcgaatgccgacggctacatcggtcattggctcgtgcagtgcgtgcagatggggacaaagatcatctcgatcgacccgattctaacatggtggggagcgcgcgcgacccattggctcgaccttcggcccggtaccgatctgtgcatcgcgctggcctggttgtacgtcattacgcaagaagatctcatcgatcacgaattcgtggattgctggtgcgcttactatgacgagctgaaaaactacctggtgacgcccagcgagaacaacgatgggatgggatacacgcccgcgtgggcctcgaaggtgacgggcgtcgacgaggaaaccatcatagcatccgcccgcatgtacgcgagggcgccgcgcggggctatccagtggggcctgccgtttgacacccaggttgattccatgcatgcgtgtttggcggtttccgacctcatggccatatgcggaaacatcgatcgtcctggaaccaacttactggttcgcaatgcgttcgagatcaatcctggctatgcgactgcgagtatgtatgccgatcctgaggcggcagcgaagaagtgcacatacaagacgctgcagcagttgcagggaaaggaacccaaggctgagccgttcatcggcatggcggattgcgatgccatgtgctacgccatggagacccagcaaccttaccccatgaagatgctgtgggtgcaaggttccaacacgtacacctgcaacggtttggacactgcccgtatctaccgcaatatcatgaatttcgagttcattgtggtggctgatccgtatatgacgccaacggcggccgcgttcgccgatattttgctgcctttgaagatgagcatcgagcgcgattcgatgcgcgtgtggtggcagcccttgcgcgccatgaaagccgttacgacgttcggcgagtgcaaatcggatgaggagatcatcgtgtggcttggcaaccgcttgaaccccgagctgttcaacaagcgttggcccgatatcgaccattttattcaggattacctggataccggattcaacctcatcaacgaggatggatcgggattgaagaccgccgggcgcaacaaggcgggcgccgatgtggtcgccgacgcccataccgagttctatcgcaagcacgaaggcaagggaacgttcatggacctggtcgaacaaggcggctacgaatacgatgagttcaacaatcagtacgagaagtacgccaagggtttgttgcgatcggatggaacgcctggcttcgctacgccttcgggccgtatcgagctcatctctccgactttccaggcttggggcattgatccgtggccgaagcactacgaaagcgctgcccagcataaatggacgactgatgaggaataccgcaaggagtatccgttcactatcatcaacggcaatcgttcatacgagttcttccactccgagaatcgccagcagaaaaccatgcgcgagttccatcccgtgccctatgtgcaggtttccaggcaaaccgccgaggaatacaatctggccgacggagagtggatatggatcgaaaaccacgttggccgctgcaagcagtgcgtgaagatcaaccctgcattgcagccgcagtacattgtggccgagcacggttggtggttccctgaaggcgatggaaacgcaccgagtttgttcgggtcgtttgattgcaacatcaacaacctgacgtattctttcgagactggcgagggcggcatcggcgcaccgtacaagagcattgtcgggcgtatctacaaggtacaggaaggcgatacgctgccgagcgtgcagattcttgaaaaaggcgggttccgcgagattccgccatgtggtgtgagctgagggagggatgagatgaagggcattcttatcaactacgagtactgcacgggctgccactcctgcgaggtggcctgcaagaagcgcctggggctgcccgagggggagttcggcataaagctcaccgagaccggcccctgggagtactcgggcaaggcgggcgaggagcgctgggagtggtcgtggctccccgtcctcaccaaggcctgcgacctgtgcgccgaccgcaccgaggcgggcaagatgcccatgtgcgtgcagcactgccaggcctggtgcatgtaccacggcgaggtggaggagctcgcccgcaaggtcgacggcaagacccgctgggcgctgctgacgccgcggacggcgtaaggcggatgcgcggggctccggtcgaaggcgccgtcgcggagccgcatgcagcggttttcgcgtgaagacgattcgggtaaactcgcaatggcgagccgcatctcaagcggatgcggctcgcttgcaaccaaggaggttcgtcatggcgaatgcgaacgacaaaacgatattgctagaaatcgcgtatggttccgaggatgcagtcgatcgagacgtcgatctgttcgaggaattctatgcagggcatttcaaagaagaagccctgtctcggtttgtcgcccgggcgcggtcgcgcaatcggactctcttcgttgcgttgtgccttgccggtgctctgcttgtgctaccgatggcgattaacccttcgtcggtatttgcggcaattctgcttgccatgggtgtgatgcttatggtggttggactgtattttgcataccgcatggctacggcggagcgcttttgttcggaaaacttcggacggcttatagatgacgagttcgccgcttcccgttcggtgacgaagcgcgtatttgccatccgcctttcggaactcggcgtcacggtgaacttcggctcgcaaacggcagtcaagcagacgaggcgcaagggttatgaagagattcccggtgtgcatcttaccgacgatctggtgtttatcgagggccttacctgggtggctcggtttcagacgtcagacgaggagttttctgcgttgtgctcgctgctgaagcagcggtgtgcggagcgattttacgattggaggattgctctttcgggatcttgatgattgccgggccggcagcttcgcaggacctgcaccgtgcttgccgccgacttatgcgccgccttccgttgccgatgcgctaccatggatgcagtagctagggaaggatggggttatgctggagcagcatttgcacgaagacgttacagcgcgggggcacctgatcgattcgaatattctttcgaacatcatgaacggcatcgtcgagctggacgggacgttcgaagtgctctctttggatatcggccgtggaaacgaaaacccgtcgacgattaccatgcgggtgttcggccgcagccgcgagcacctatcggaaatacttcggaccattcacgaattcggcgttgtgcccgtgcatctcgaagacgtgtgcctgcagcctgcgccggccgatggcgtcttccccgaagacttctactccaccaccaaccttgaaacctatattcgcctcgcgggccaatggcggcacgtcgagggtaccgagatggatctgggcgttcgcgtcgacgaggtgacgcagactgcgaccggcgtacccataagcgatgttcgcaaaggagatatgttcgttgtcgggcaaacgggcctgcgcgtggtcacgcaggagcgcgctcgtgaaaagaccgagttcgaattcatgaattcaacggtgagcagcgaaaagccgaaagcccaaatcgtcaagcagatcgcgtcgattttgcgcgaagtgcacggcgacgggcgcaagacgatcgtcgttgcggggcccgcgatcgtccatacgggggcgtcggcgcatcttgcgcgcatcgtgcgcgcgggatacgtgagcgtgctgttcggcggcaatgcggttgccacccacgatatcgaggttgcgctttacggaacgtcgcttggtatcgatatgcagagcggtgttgccgtgcccggtggaaacgagcaccatcttcgcgccatcaatcggatcagggcggccggcagcatcggcgatgcggttgatcgaggagtgctgacgagcggtcttatgtacacgctcgtgaaaacggggactccctacgtgcttgcggggtccatacgcgatgacggccccttgcccgatgtgatcaccgatgttatcgaggcgcagcaagccatgcgcgcgtggtgccgggaagcgggggcatgcatcatgctttccaccatgctgcactccattgccgtgggcaacatgctgccggcttcggtgacgacggtatgcgtggacatcaaccctgctgcggtcacgaaattgggcgatcgcgggagcatgcagacaatcggcatcgtaaccgatgtgggtctgttcctgcagcttcttgccgacgaactcggatgctaaccgttcactagttcgtacacgccttctttggagtgcaccccgagcttcgcgtagaggtggcgcgcatgggttttcacggtgttctgcgacaggaacagcgcctgctctatctccacacggcttttcccttgggcgatcagttcgagaatctcggtttcgcgctcggtgagcccatgctcgagcgcgagcttttcgcagcgcacgatcagctgctcgcggggcccgggaacatggacgctgctttcgatgctgattcccgaggcgccccaatcggcgtttaccgaccgttcgctcatccaaatgagcgtgcagataagcagcaagacgatgcctgcgatggccacggcatacaggaaggcatcgtttgagagcagtttggtttgctgcacccatcgccgcgccgatacgccgaggaagatcgctccctcgctgacggcccgcgcgatggcgaacaggcgaaggctcggcacttcgaagcggtaggcgatgttggcgagcatgagcaggacgaacaaggtgaaccacacgtaggcgagcttgatgagaaacgaaatggcataggcccatgatgatccggcaaacggtacggtcgcaagggctatgatgcagatcggcagaccgatcttcgcgaggaaccgcacgtcgcagcgctcgcgtctgagaaacaccattacgaggatgaccacgcccgacaagcccgtcgcggcaacgcggtggatggctccggttccgtctgcattgctgagaagcgaacccaccaagcccgaaagcaggcctgcaatggccatgagaccgaaaagcttccacggcagcgggaaccgggtgttggcgaggcgcgtcggctcagcgggtacggtgctcaggctgagcgcgatgcagataagcgagagaatgggcaaaagcgcggttgcgataatggcgtacggggctgccatggtaccgatgacgaacgaggcgattgctgcaacgatgcaggacaaggcgccgtagacgatggttctcatacttcccatctggcaatatatttcggcccagaggcagaagagaaaagctcctccgatcgcggtggcgaaggatgctgcggcgatgaccgtttcgcttgcttggctggggatgagccacaggccgatgcacgccgttccgatcgaggtgagcactacgaatgcggcgcttgtcgccatccgttttccgagcggtccgatgcgggaggcggcaagggcgagtacgagaaacgtggcgatatcgccgaaccgcatgccggtatcgaagacggtgcgcagcccgcgcgcttccgcatcgacgtcgccggggaaaatgctgacaacgtgggtgcagcagagccatgcgatcagaaggcccattcccaggaagcgccaaggatagagcgtgctcgacagagcatcgccttcggaggttctttcttcgggcgcaagagcgcgtgccatatcgctgggtttcacggcatcccttccggatcaaacggttggcccattgtaccgcaagatgataccgcggttcttccatggcgctttgatcaggttaattgcggggtgacaagcggggtgagctgcaaatcacccggcgtttccggggttcacccgcgacaaggcggaccttgcgcggcatgatggcgatgcgctggaagagggcgcatcccggcaaagcggatcgagagaacccagggccgggcaatcgattgggaatcctcaggagggatcgacatgacgaaagaaaccaaaggtttgacgcgtaggaacttcttggcgatggggtcgcttgctgcgctggctggaaccgccgctttggctggttgcgctccgagcgcctcgtcttcggaaaccaaagcgggggctgatgaggccgccgatgcgaacgcgatggcgactgccgatgagaccaaggaatgcgatatcgtgattctgggcgcaggcggtgccggcatgtgggcggcggtcgaagcagcccgtgcgggcaagagcgtcatcgtgatcgagaagggcaacaacgtgggcgttgcgaacggttcgcttgcgggcggtccgttcatggtgggctcgaagctgcagcaggaagccggcatcgagtttacctacgaagaagccttcaaccatatcatggagtacagccactggtccacgaacgctgcggccatcaagcaggcggtgctgctttccggcgacacgatcgaccgtttcaccgaggaattcggcgttgccacgggccttcgccccgacaactacggagcgggccatgcttcggttcgtgcgaacttccagtccgatccgaaagactccaagacccaggcgaagggcgaagatcgcatgggcccgcttcagaagtgggtcgaggagaaaggcggcgagttcattttcgatacgacgggcaagcgcctcatcatggaagacggcgtgtgcacgggcgtgcagtgcgagcagggcaagaccgtcctcgatgtgaagggcaaggccgtcatcgtggcgacgggcggattcctcggcaacgtcgagatgatgaaggagcgcttcggcaccttcgtgaacccgcttggcaacatcctctcgatcggcgagggcatcgacatggtgcaagctgccggcggacaggtctccacgcagtggggcatcgcgggcaacgagttcaccggttccaatcagaaggccgacggcctctacgagcgcggcaacgccgccttcaccatcggcatctacggcacgcttctggtgaacaatcagggccgtcgcttctcgaacgagggcaagttcgcgaacctgccgctcgctctcggcggagccatctcgcttgtcggcggtcagtactatgcggtggtcgaccaggcgtacgtcgacggtctcaacgccggtaccgatgcgtggacgctgtgcggagccgacgaggtgaattggcgcaccggtatgatgacgctcaaagacaagccgctcgagaacgtgcaggcgaacatggacgctgcggttgaggcaggctgggcgttcaaggccgacacgatcgaagaactcgccgaggccatcggcgcccccgatctcgtgaacacgctcgagacttacaacggctactgcgaagcaggcaaagacgaggacttctacaagcccgcctgcttcctgcagcctgtgacgaccggcccgttctatgcgttgcagtacgagccgagcgcgtgggtcactatcggcggcatccgcaccaacgatcgccttcaggcgatcgacggcgagggcatgccgatcaagggcctctacgttgcaggtgccgacaacggcacgctcatgagtgctccgtactgcgactacgagggcttctcgctcatgtgcgcctacagtggcggtcgcatggccggcatgtacgctgccgaagagatcgacgcgtaaagcgatttcgggcggatgcaagccccatattagccaatcccgcgaagcgcgtgccgactcctccctccctcctcgctcgcgccttccgcatgacttcgcccggcagcttcggcagccgggcggctttttcatgtctgaacccaccctggctcaccccgtctgcaatccgggtaaaaaggatgatcggccacatagaaaatactttctagtcattctgttccctcttgaagtaatggaatcggttctgccaccattcatagagcagtgaggggaaaagagggggtacatggataataaggtaacggcagacgattactcgctgttggaacgcgccctttcgctgtcttcgatgcgggcgcagacccttgagtctctttccgcgggtctgggggaaaccgtcgaagatgcttcgctttactggtttgccgccaacaagctgcgaagaagccagggccgctaccttcccaccccctacgatgcgccgctcgacgagaggggcgagcagcaatgcccctccgacagctggtattcgcagacatggcgcttgggtcggctgctcgaacggtttcagatcaacgaagcccttgcggtccactacgcggacatcctcaccgatcccgaaggcggccactacgagctcaatcttgccgcaagcgaggtcgtgctggcggtctgcttcgagaacgtatcgcttgacaagcagcggatgaagcgggtgtgcgttcacgcctgcgagccgaccaacggcatcgagctgctcgtatcgaatgcggggaagatccttctgagcgtcgaagactaccgcgacaagccgattaccgccgctttcatcgaagggctgtacgcgcgacttgtggaaggaatctccatcaaagaggtgagcgaggttgaggagcacgacgccaatacggtagaggatctgcgcaaaaaggcgctcgattccttctgctgctgtctctggcctcgcgaaggaggcgccgctgagcttggcttagacggtgccgactgccggcatctcggcgattgcggcaaccactccctggtcaatgcgctcattgcgcttcattacttcaaaacgtttcgcctgttcccagctgggaacaacgtgcttgcctacttgctgtactttcttattctgcatcgcgagggatatcacttttcagcgcacgttcccgttttcaagctgctgtacgcgtgcgacgaagccggtgacccgcgggcgggtttgccgtgcgatcccgacgaactggccgtcgaatgcgggggctatcgcgatctgactcgttttttcgagcaggctgtcgaagcgatcgtcgatgagcagcgctggaccatgacgaagctcgacggcatgagtcggcgtcgtgagcggtttcgcatcatcatcgactcggacgaaaccatgaacttccgccagaaagaagtgctgcttgaggctatcctccacagcaacgcggaattcacttacggaatccacgaacagcgctacgacgtctcctatccgtgtgcgcgaagcgatttcgcccgtctgctcgacatgggattcttgcggcagcacgacgatggcatcagacatttcttcgtcgctgctgatggtttcgaacaaacgtttttggagtatttgaagaaccattgctcaccggcgttttatcggtactacaacgaagacggttcgctgcgcagcgaatacaggagcgccgaagcggcatcgtatgcattcaacagagacatcgggttttacgaaaaatcgcttttggataagacgtatatcgagcaccacgattttcggcgtgctcccatagccgactgcgatggcccgcgaaggcgcagctgtttgggagacggctgatctttttgcacggcgaatcgacgaacgggggaagttcggcgattgcgcccgggccatcgaggcgataggggaaggatatcggaggagaaaggagaatcggaggttttgctttcttaccactaaggaggatcaatgaaagaaaacgctggcgagcgctctacggcgcgctcgaagagcaaagtgaaatcgatcatcgtgctgctatcggtcgccttggtcgtctcggctgccatttggggatgcagcccgcaggcgtcgaccgccgaaacgaagtcgaccgatgccgcgaacgaaagcgcgaaaagcgcgaaatccgacgaagcgggagtcgacgagctgtcggctttcagcgggttcccgacgacggggcgtttcgtcgacggcgtggcatcgctgcccgacttctacaagaattccgaaaagaacgaggccaatgcgaaggccgaggcgcctcgccgatacacggaccgcaacggctttctcgtgcagccggttccctctgatccagtgagctggaacaacacctacttggatgccgacaatcgcggctgtacttcgtgccatacgctggaaaacgccctcatgagtcttccgacgtaccatcgtctgatattcttcgggtatcccaccgagcagagctatcagaactgcgtggcttgtcactccgattcgtattcgggcatcaagttggccgatatcatccatacgacccacatgacgagcacgatgttcaacgacgacgatgagggcacatgccaatcatgccactacatcaacccgaacaccggcgagttcgatcgctgggatgaagtgaagtacaatctgtacaagggcatcaccgatgtagcgtccgatgatctcgaagccgacatctcctacgaccagaccacgatcaccccggcggaaaaccgcatcttcaaaaccgttaaagacgagccgagcgagtggctcaccgatgattctgtcgttgacgagtctattttcgagaactgggtcatctccatcgacggcgactgcgagaacccggccgagatgacgcttcccgaaatggaagagcaattcggtaccgtgaagcaggttatgaagatggattgcaccatcaacggcgtaggccaggccaccatcatgcagagcgaagtcgaaggcattccgctttccgcgatcatcgattacgcaaagcccaaggcgggtgccaatacggtaagccccatcggatcggacggctacgactacgcccagatgagcatcgattggctgctcgaaaacgacgcggtcatcgtgactaaaatggacggcgaaagactgcccaacactcagggatatccttgcatgatctgggtgaacaaaacttccggaggcaacttcacgaagcgcatctcgaaccttaccttcatgacgaaggccgaagaggatctcgacaaccagctctatatcggtcagttcaccgacgataagaccggcgagatatactcgaagcccaacagcggcgtcctcaactatcccaccggcgtggtgctttcgggcgacgaagctaaaaccgtgcatctggaaggcttcgccgatgcatgggacgagccgatcgaaaagatcgagtactcgttcgatcatggtgagacctggaccgttctcgatacgccgaacaacaacgcggattactggacgtattggaggatggacttcacgcctccggcggccggtgcgtatcttctcgatatccgcactacgagcattactcccgatggggctgagcgcgtatgccagtacgacacccagttcatgttcacggtagagtagggggaaccagtatgaagacaacgactcgatacggtcgcaccgctctctctgccgtcgctgggctcaccatggctgtttccatggttgccacgccggcgttggcgagcgagcctgttcaggatgcggctgcgacttccgggggcgctgaagcgaaagatgccggcacgacggtcgagagcgcacagatcaccgatgcggtggtggcgggagagttttccttcgaccagaccactatcacgcccaacgaagtgatcaagacgttcttccagcgtgccacgcaggcgatctgcggagcgtcgacgagcatcgcagccgataacccgcttggatggcagctttcggttacgggagacgtgcaaagcgcattcactgcttccgtgggcgatcttgccagcgaagaatcggttaacaaagttatgacatgcacgtgcggcggcaaccccgccggtggtcgagccatcatcaccgctgatgtgaaaggcgttccgatcgaataccttctttcgcgcgcgggcgcgaacccaggtgcgaacgctttgacgttcgtctcgtctgacggcaccgaggcgacgttcccgctttcgtatgtggtgggtcgtcatgcggtgctcagctacgagatcaacgacgaggatctgtcggcctctgtgggcggcaacaaccagctttggatgatgaagacgccggccaactacttcgtacgcgatgtggtgcaggtcgtcgtatcaaccgaagcggttgcgcccgaagctcccggggcaaccgacgagcaccccaacagccccaatgcaggcgtgcttgcgggcgctcaggaatagggcgggacgatgatcgctcctatgcaggtcgaggtcggcaagccggtaacgtttagcgggtacgccgaagattacggcaggcagatcgtatcggttcagttttcgctcgacaacggcgagcattggacctcttacgacgtctcagaatcgtcttcggagctgtgggttcactggacgttttcctatacgcccgaaagacccggcttctaccggctgctcgttcgctcggtgaacgacgagggcgtcgaaagcccccttgccgatgtagcggagttcactgccgcctaggatacagtgcagggaggctgcttcagcggtctccctgcgcatgttgctttgggttccgagcgcgatcagaacccggagcttctctttgtcaacggttttcttcgccgtgtacggttatgctttactcttgatgaagcttggtttgaacgggtgattcgtcgaaagggaagccatggccacattcaaggaattcctgcgcgttgccgagataacggtgaaggataaaacgtcaggcaagcgcatgaaggaaatccggcagatactcgcgaagcatcatgcgatgtcggggttgacccctgaaaaagccgtggcaatcctcgaagatctcggtccgacgtacgtgaagatcgggcagatcgcctcgaatcgcagcgatctgcttcccaaaggatactgcgatgcattcgaaaagctgcgggccgatgttcctcccatgccgttcgatacggtggtggaatgcctggaaacatctttcgacgcctcctggcagacggttttctcatccatcgaggaaaagccgctcggttcggcttcgatcgcacaggtgcacaaggcgacgctgcacgacggaaccgtggtcgccgttaaagtgcgcaggccgggcatcgcccaagagatggccgaggacatcacgctcatcaagcacctgatcgctttggccgagttctccaacatggctcccgacagcctcatgctgaccatcgatgatctggtttcggaattggagaggaccacggccgaagagctcgactttacgatcgaactggaaaacctcaaacggttccacgaggaaatcaaggatcagcagggcgttacgagcccgcttccgtatcccgaatacagcaccgacagggtgcttgttatggaatacgtaacgggcacgttgcttgataacaagaaaaggttgcaagacctgggcaaaaacctgcctgccatcggggagcggatagcccaaagctacgtgacgcaggtgatcgacgacgggttcttccatgccgacccccatcctggcaacatcatggtcaacgacgacggcatcgtgtggatcgacctcggtatgaccggaacgctcacttcgagcgagcgcgcaatcgtgggcaaggtattccgcggggttgctctcaacgatccctatgcgctcaaagaggcccttctgagcttggcgaaggcggatggaccggtggatcacgggatgctgctcgagcagatgggcggcatgctcgatacgtacgcttccgccgatctgtcggatatcaacatcggcatggcgttcgtggacgttatcgaaatattgcggacgcagaacctttcgctgcccccctcgtttacgatgctcgcccgtgggtttcttacgcttgagggcgtacttaccgacatcgcgccgtccatcaacgtggtcgatatcgtatcagtgcatgtgaaaaagcagatgtggacgctttcctatctcgagggaaaggcgcaggagctgttcacctcgacggcggcgtcggccgaggctatggcaaccctgccctcgcagttgtctcgcacgctcgacatgctcgaccgcggccagctcaaagtagccatggatatgaagctgcctcacgacgtcaagggaactctgtaccaggtggcgagcttgttggcgcttgcgcttatctcggctggcctgttcgtggggtcgagcatcgtgtgcacgacgcctatgcagccgcagattttcgatgtgccgcttttgggtgcgcttgggtaccttggcgcgttcgtgctcggcgtgtacgtgatagtgcgcgcagtcgcgattcgccatcagcaggtgaacgacgagaagatcaaatagccgattcgccaacgcaggcgggtcgcgacagcggttggacgagcgcgcggcttgcagcaggcgatcgcattgtgccgacaggtctatccgccgagcgcatgggacctgggttgcttcggcttgatttgcgggatcgatcgctgcccctgaaaacccttaatacccttcctatcagcactgttacctaattatctgttagctgcttatcgaaaaaatcttgacatccatcgggggggggggtatcattgcagctataaccgatcgggttatacgaaaatcaacaagcaagaaaccgctccgcgggtggtttcggatactgcaggggcccatgctcaggcatggttgtcctattgcgggtaaaaacggccggacgcaatccggccgtttcccgtatacgggcggcatttgcgagcgacgaccccgggaaaggagcaaggatggataccatatccaggcagatctcgagcatcgcggaggaggcgagatcgagaaagctgctgtccgtcatcttggcgttcatcttggccaccacgcttatggttccccatacggcatgggccgaaggcgatgaaggaggcgaaggggcgcagacgacgggcgttgccaagatcggcgacaccccgtacgacacgctgcaggctgccatcgataaggctcaagccgacgatacgatcgtcttgactgccgatacgaccgaaagcgttacgattgccaaggaaaagagcgtgacgatcgatcttggcggctgcaagctgacgaacgtcgatggcaagcataccatcaccaacaacggtacgctgacggttaagggaaccggcaccgtggacaacgtgtcccacgcgagggcggctcttgaaaacgtcgagggtgccacggcggttctcgacggcggcgcctacacgcgcagccaagagaacggacagagttcgaccgatgcgggcggcaattcgttctacgtcatccgcaatcatggagcgttgaccatcaacgatggcgtcgacgtgtctcagaacggccactattccagcatgatcgaaaacggctatcagaatgccggggccgagaagaaggatcccgaaagcgtgccttctctgaccattgcgggcggtacgtttgcaggcggcctgaacaccgtgaagaacgacgactgcggcgttctcgaaatcacgggcggcacgtttacgaacgtgagccaggcggtgcttctcaattggaatgtcgcgaaggtctcgggtggcgtgttcacggcaaccgaaagcagcgatggcgttatcctcaatggcatgaatcccggtgaaatcaacaagggcgatttgactatcacgggcggtaccttcacggctgctgccgatgcggaggtcatctcccagatgggtggcagcacgggcatcggcacgatatcgatctcgggcggtacgtactccgctaccgtggaggatttttgcgccgaaggatactcctgtacgctcgttgacggcgcatacgttgtcggcgagaccccggctcccatcgtcgccaagatcggcaacgatgagtatgcgagcctgaaagaggctgccgagaaggcggtcgccggtgacgtcgtcgagcttttgaccgatgtcgaaagcgagccgattgcttttgagaacaacgtgacggttgatctcggagcgaagacgctcacgatcgtcggcgatgacgcaggcaccgtagacggtctgctgtttgcaggcgctggcgacaatgcgcttaaaaacggcaccgtgatcgatgcccgcagcaacggcaaccagacggcaggctggaaggtcgttcacgtttcgggtgccgcgaaccttgctacggagaacgttgccatccaggcatacaagcccgataccgagagcaactacaattatctgatctacgtaggcggaaaaggcgatagcaaggcgaaagccgtatcccttggtgccggtacgaagttggaaaacctcgacaacacggcgagcacgagtgcggtaacttacggtgcggttggcgttgctctcatcggaacgacttcagacgcttcggctgttgccgaaaaggtttccctgacggttgccgaaggcgttgtcatcgacaccatgggctatgccatttccggtaacggtacgttccatggcaccgatatcgtcataaacggcggagatgtcaagagcaccgcttcggcggcggtttatcacccgcaggcaggaaccttggtcctcaacggcggtacgctcgagggcacgacgggcatccagttctgctcgggcgagggcaccgtcaacacgagcttcgatttcaacggcggcgtggttaaaggcgtcggcgaagacgagcgtcccggcaaaacgggcgacggtctcgtgagcgacggtgcggccatttcgctggtgaaccgcagctaccccggtggcgctccgtctatcacgatcaacggtggagagttctcttctgtccacaacgaggctgttctcgcctacacgtggtccaagggccaggcgtcggactgggccgaagcgtctgagaacatctcgatcgcgggcggtacctactcgagcgacgtgtctgcttatgttatcgatggccttgcctgctcgaagatatccgacggcgtttaccagatccagaagaagatcgaaggcggcgacggcaacgttgaggttcaggctcctgtcgtgtctggcgacaacgttcctgccgacaagcccggcgtgcccgaggacgacgaagccctcagcacgatcgccgattctctgagcgatgccatcaaggcagacgagcctgccaaagacggcgcaatcggcggcaacaagatcgagacgggcaaggatagcaagatcaacgatcttgtcaaggatgccgatgctgccgatgtgtcggcaaccatggtggtttcgtctattcccgtagcggctggcgacgtcgatcctgacgaggctgacgccatcaagggcgtggccgccgaaaacagcgccatttcgttctacgatctgagcgtcaagctggttgtctccactcctcgggattcggtcgaggcgaaggtcaccgagaccgccgctgctattccgttccagatcaaggtcgaagacggtttggtgggcaaggacgttcaggttgtccgctatcacgacggcaaggccgaggttctcgacggcgtcgaggccgattacgccacgaacgtcgtgtcgtttgccggcgacaagttctcaacctacgctgttgttttggctgacgccgttgaagcaacggtgacgtttgactgccagggcggttccgctgtcgagaaggcaacggttgacaagggcgattacgttgccgagcccgccgttcccacctacgagggctacaccttcggcggatggtacaccgacaagagctgcgcggaagatacgaaatgggacttcgagtccgatcgcgtaacgggcgacatgacgctgtacgccctgtggaccaagaacgctacgcctgtcgtgccgacgacggctgcgcgcctcggcggcgatgatcgctacaagaccatggagctcatctcccaggagtccttcccgacggccgggtcatgcgagaccgtgatcattgcgcgcggaaacgatttccccgacgcgcttgccgcttcggcgctcgccggtgcgaaagatgcgcaggttctcatcaccgaatccaatgcgctgactgccgagaccaaggccgaaatcaagcgtctcggcgccaagaacgccatcgtgctcggtgacaagtggtcgatttccgaaaatacgttcaacgagatcaaagcgctcatgagcggtacgacgacccgcatcggcggcgccgatcgccttgagactgcttacgagatctacaagtccaacgccggaaactggggcaagacggccatcgtggcgactggcgaaaaggctgccgattcgctttccatttcatcggttgcctacgccctcgaagcgccgatcttccttgcagccaaggacggcaccgtttcgcaggacgtgctcgatgcgctttccaagggcggcttcgaacgcgttgtcgtgctcggcgacaaatggtcggtttccgacgattcggttgccagcatcaagaaggtcgtcagcaacacggagcgtcttggcggcgttgaccgttatgagacttcgcagatgacggctgagtgggctgtgaagaactgcagcttcgattattcgaacgccatgctcacggcgggtcgcgacgacaagtacgccgacgcgctcgtttcgtcgtctctcggcggcaagaacgcttcgcctctgctgcttatcgacgaaggcgaaccggcgtcgttcatcatctcgaaggtgcttgtgcccaacaaggatggtgtcgagaaagcttacgtgctcggtgacaactggaccgtctccgatgatcttttcgcagctatcgaaaaggcgcttgcgtaaggcagaaaaccaatttcggctcatacggcccgagagacccccgttttgcgggggtctcgtcgttttttttgcgcaaccggcattgcatcgaggcggcaaaacaggagtccctgcgggagcgaagcgaaatcagacgattccctgcgcatctcttcgcttggaatccgaggctgaagacagggcgtatgccagccgaagcatctcctctgcattggttttcaagcggtaggattgctcccagttgcgccgtgcggctgctcgcatggcttcgaccttcttttcgtccatcgctacgaacgcttctatcgcgtcggcgaggtcctcgtcagtgaaatcgcgggcgattagctttccgcatacgccatcatggatgatttcggaaacgcctcccacattcgttgccactacggggatgccgaagctcaacgcctccatgatggaaagggggattccctcgtattcgcttgcgttcacgaacagatcggtgaacgtcgagctgtagtaatcgaacaccttttcgttgggcagcgcgcccttgatgtcgacctccgtcttcttcagaagcgccgccttttctttcagcacgccaagctgatcgccatcgccgatgaaggtgaaccgcagacggtggcctctttcctccagcacgagaagcgcatcgatcacccgatcgacgcgcttgagcgagacggctcgggaacagcagacgatcgagaaggcgtccccttttcgcgaagggtcctgcggctgggtatccgccgttcccaagcgcccgacccgataagcgcccgatacttcgggatccctttctttcaggtagttcgctccgttttgcgagcagacgagaacggcatcgagcttttctgccatccaccgtttgaaggcgttgtagccgcaggggctgcggtaatcgtagcagtcgtatccgtgcgccctgcttatgcagaccgggcgcattccgctttgcttttcaatgcggcgggcaaggctttgcatggcgaggatcggctcgttgaaccagtagctgtagagaaggacgcgacctgagaagacgattttctgctcggcgattacttcgagcatgcgctgcgctttcatgtcgcccagctgaagaaaggaggtggcggcgaaaagcgtttcgcgcgaggtgatcctgcgccgttcggaccatacggcaccgagatgcttcgcgaggcatcccaagcgtttcagcctgccggcaaaggattcgcttggtatcgtcgcgcagtcgcttatcccgaacgccgacacgttttccggcaggcctgctttgatgggccagccgtcgaaccatccttcatgggcgaacacgatcacccggtcggcgtgctcggcgagcacctgcatttcccgctcgaggtagctttccgcagatggctgccctgaaacgaaggggcattcatgtgaaagaacgacgatggtgtcgaatcgggcggtctgatttttgtcgtttgcgaggagcgtcggttgcgtgctaagcataagagggcacctcgaagaccaagccggatttcgccatgtcgagcttgttgtagcggtagcaatcgctcatgacggccgcgatgccgactgcccaggtgcgggaagttgcgtactggtgccagggattcgggtttatcggcgccatggcgttttggatatcccacttcatcttgtacagcgtgttctgcgggttgggctgatcgttgatgtagtatttcgcgatccaccgggcggctcccgtgatcgctttttcgggggagttccatccgttgatgattgcgagctttcgcccgccgctcaaaggcgtatcgtcgtacgcgccgatgccgtagaaattgtagtacgtgcccgcaggatagtatgtgccgtcgatggttccgccgctatagcggtagccgttcgcgagctccgaggttccccatccgctttccaagatggcgtgggcgagcaggtacacttcgtttacgccatactgcttggcggcatcgatgaaggtttgaccttgtccggcgagcattccgtttgcccctttgggcacgcttgcgatgaagctgttgatttggcttgccgatacggcatgcgaatagccgtctgaaagaacggcgaactggtagaaggactgctcgccgaaagagaagttgtcggggtcgaggtattcgagaatctgagatttgctgtagttctgatatccgacggacgctttcacttccaggttggccatcttatcgagcgtgatgctgtaatcccgatacgaaacgagatcgccctcggttccaaagccgagccgtgctcggatgagcgagcgggtggcatcggtgatgctggcgtttcctccgaagaatttgatgctggagatcgagcctttgttttcggccgccatctttatcgtcgggttgttcgatttggagttgacgagcagaaggacggatccgctcgttccctgcacagcgctgcccgcaagcgcatcatacggtttgtcaccggaactgaaggctgctccatcccaagtgaatccctgcgcgggcgacgtcgcccaggcggcgatattggcgcttgcttcgtagcggtcggctccgcccagcctcgtgacgtggttttgcatccccgaagacaaggcggaaacgcttcccatgaatgtctgcgttgcctgcgacacggaatcgggcccgccgacgatgatggtctccttgaacatgcccttttcacgggcatctttggtaagcgtgcttttctgggcggcgttcaatgcgccgttgttcacgaggaaaatgggaacgacgtctctgtacgccacgggagagacggaaagggcgtcgctgaatccgtttcccgatgcgatgatgacgcggctatcggtccacaggcccttatccaggccgtattggtagatgttcagctgaaccgcgtaccgatcggccccgccgagcctcttttcgacggcaaaccccttgttctcaagctggatcagcacgctttcggaaacggtgttggggcctccgacaacgatgattttcgagacgccaagccgagagagcgcatcgagagtgcacgagggaacggaagcggcgttcgtaaggaggatcgggcacttgagcccgccggcgagactggttgaggagagggcgtccgcccatccttcgctgccggcgatgatggcgtactcggaggagccgtaggcgtacagggcctccatcgcagctacttcgaagcggtcggcgcctgagaagtacgtaatgggatcgctcgatgcgtttaagctgaggcttcgcgccgcaggctgctcgtcttcaccgggtatctcggctagaacgtcggagatttcttcatcggtgatggtgcttgttgctagaggattgccgccgtcatcggggttcgggggggggtggtttctgcgccgttggtttcttgcgctgcggcggagtccgtagcgtcggcgtcggttgcgggggagtccgcggaaagcgcttcgttttcggtgtctgccaaggcagaggaggatgctgcgggaaccaatgcagccgatagggtcaaggccaggaaaacggatatgaggggcttgctgcgttttgtcatgtctgctccttctgatcgtgtgtcggttcggatcccgatcgcttcggcgtgcgccccttgccgcgagcgagctgggatgaggccattatataacaccattgatgatattaccgagaagcttatcgaacgggtatcggctgaaaggagaatcactgctgcgccggttcgggcagcggcgacgatgcgaggtttcggggctttctgccgaattggcctattcttcttcgggaatccatgatgcgccgaactcggcgtctttgaacagggctgccaaccccgtaatctgcttgaggcgcaggatctcgtctttgtccatgccgaggtgcttcgatatccatgcgtctgagcggccgagctcgtgaagatcggcgacgatcttgctcatgaggtcgacgttgtgggatccccgtgcgcggttgtgcctgatcgtcgatgccatgcggcagtcgagcggcttgtcgatcacggataccggcagcatgccgctctcccgttcgcgaatgtcggggtgctcgagcataacgcggtagcggtggaatccgtccacgatcacgtattcgtcgcccgtttcgtcgaagtagcacacgatgggcatggtgtagccgtcttccctgatgctgtcgtaaagcagatcgagttcgggtggagccaccgagttcgggttgtacgaattcggcttcaccttttcgatcggtacggcgattacgctgtatacagggcttctaggctccattctctcctcgctttccgattaccgcccggtactcgcgcttgagagcatcgacgcgcctttgctgctcgcgcgttagcccgaatcccatgaagcggcagttgtggtcgttcttcaggatgcagtagcacattctcttccagctggggatgtctttggtgctcttcacgtcgtcggtgtggtcgggaaggtcgccctcgaacacgatgcgggaattcttgcgaagggtatagttggaaacgccgttgcgccttatgcggtagccgcgctccaagagctcggatatgacctcttcgcttaggcctccgcctgtttcgtaccagaactcgatcgaggttttgaacttgcgcacgtagctttcgcgcagctggcaggggagcgtttcgagcaggaagaacgtgaacgatttccacgtgtgcccttcggggagttccaggtttcgatatcccatggccttggtgcggcagtagattgcgccgaagttcgcaccctgcacgcgcccgacgagcttggcccatatttcgggatcgatcacacggtagaggttgaggctgtccttcgccgaatctccgaagggggaggcgacccgcatttgatcgggcgagaggcccgccatgtggtacaggtcgtaaaggcggttgtagtcgtatccgaagagcgcgtttgcgtgccagacgtcggacaccgaccaatcgtaaagggggcttgcggcccaaacgcccttgaattgcgaagtgatccagcatttcccttcgtagccatggcgcttgttgagtattccgctgtagcggtgcagcgattcgtcggcgcggatcccgagcaggcagaccgtttttccgccgccgtgcgccatccggtaccaccttccaaactgcttggcaagatcttcttggtgcatcctgtagcggtaggtttcgatagggttcttttcgaggttgacgacgtaagggcgttcgggcatgggacggacccatgcgtcttccttctcgtcgtcccacggataccagaacatctcgtagctgctgagggcggttctcgtggccatgggcaggcacacccagtagggttccgtttctccttcgattctgtcgaaggtgcgttcgacgtactcggtcgtggccgagtactgcgcttcgaaatcctgatggaacacgccgacgatcttgttggggaagtgtttgtttctgaagtcgagcaccaggttgagcagaaggccgctgtccttgcctcccgagaatgatacgaacacgttgtcgaactcttcgaacacgaaccgaagacggtcctgcagcgcttcgaaaacgttttgttcggtgtatcttctgatcatatggttgatgcccgttggatgccgtttgcggcttgcgcgccgtattcgcgaaagctcccttaatgattaacataaaacggctttgcttgccagtaaagctgacctatcggcatagaatgcctatcgggaagggcggttggcgattgggcgcgctgaaaacggaggtttgggatgggttgtgcgggagaggatcttgcggaagccaagaggcgaatcgactcgacgctgcgcctgaaaaacgaacaagtcttgacaaacatgggggggggtatcattgccaactagaagtttaagctgtttggttatagaatgcatcaatccatgcaaacccgccgaaaggcggcgacgcaaagctacaggggccacaccatgtaggcggccagccagttgcagatcgatggatgcgcggagcgcctcctttcccgtatcgagctgaaacaagaccggtcgaggctacaggtttcggccgttttgtttttcgggacgtcgatgcgggatgagcggaaaggagccgggatggcgcaagcaaggcaaacctctcttgatgcaaagggggcgagatcgaagaggctgttctctgctttcatggcgttcgtcatggcggcaacgctcatgatcccctctgcggcgtggggcgacgaggcggatgcagcaccgccgtattctcagacagatcaggttgaagcacgatccgggagcgcggaggacctcggtcagaactttgaagacgaagcggctccttccgaggaagccgcagggcaagaatccccattcggctctcgctcggcgaaggcgaccgagggcacagccgatgcggagccgaatcgggcggcaggcctttctgccgcaggcgatccgatcgaagtcgatacgcttgaagctttgaccgacgcgctatcgagtgcttctcagggccaggcggtaaagcttgtcgcggatatcgatgcgggggtgatctctccaggcgaatccgaagttgccgcagtctctgtggaggcgggccaggacgtcgttctcgatttgaacgggcacagcatcaaggcatcgctggataccaacgggaacaactacagcaaagcccatgttttgctgaatcgcggcactctgaccattcaggatggaagtgaggccggtgcgggcgagataacgaactataacgaagcctccaatgcttgcacgcgcacggtgaaaaacgcagagggtgccgagcttgccgttacgggcggcaagatttcgagtgcgagcgcggtcggtctcttgaatctgggcacgtgcgcgctttcgggctctgcctcgatcgtatcgagcaaagccggctactccggcggatgggacaatgcttgcgcggctatcgagaaccggacgaacggccgcatgaccatcgaggacggtacgtacacgagcgtttccgaatcagccttgttctgcgatagcccgtcggcaccggtttcgatttccggcggcacgttcgtcggcaatgcgacgtacggcgcaatgaacggcaccgcgatttcggacgccgtcaccgtgacgggaggtacgttttcgagcgatccgacgcaatgcgtcgacctgtcaacctgtgtggtagcccaagagggcgatttcttcgtggtcagcagggcggaggctccagtcgatcttgcgatagattccgaaagcgcgctgaaggaagctttggacaacgccgatgcagcgcatccgaagaatctcattttgagcggggacatcgttctcggctcaagtgcgattctgccctctacgtggacgatcgtcgtttcgaacggatccagcctcacaattgcgtccgaggctgttctgttccaggatgggcgcatatcgaacgagggaaccttggtagtgaacgggtttttgaccaacccggaaaacctgacgggctcgatagcgaatatgcccgaggtgtctgccgatggctcctatctcgtcgatactccgatggcccttcaatggttgaaggtgctgcttgaagcggagggtcaatccggcatcacgagcatttcttttgcggacgacatcgtcatgcccgaaggcgttgcgttcgagagcctcgggagggcatcgaacatcgtcatcgatggtcgcgatcatgctgttgcggggcttgcgctgggcaaggcgagcggatacgtgggtttgttcaacgagctgtacggcgctaccgtcaagaacctgactcttgccgagtgcgattacagcacgtcgagcggatacatagggtcgctggccggctactcggaaagcacagtctacgaaaacgttagcgtgagcggctcggtagtcgcgacaggcgcgtcgtatggggtcggcggcatcgtgggcggcgttaagaacacgaatgcagaagacgagactcttttcgtgaactgcaagatcggcgctcagattggcggatctgccgcctacaacgtcggcagcatgttcggtaccgcatctggcgctatcgggacaatcggaatctacaactgctccaattcgggagccataaccgccaaggggtccgtcggctacgtattcggtttcgggtatcttgaaagcgctgccactctcgatatcatcgggttctccaatacgggaaccgtgaacgggggcgagggaaccataagcagcgccgcaggcagcggctatgcgtaccagaccgagtacagcgatggcgcgctttacacggcggtacgggcagacgatggaacctggttcgccgacagcgtatacggctcgataaccgcgacgacggctgacggtggggaaatcggaacgttcgacgagatgaaagacgctctcgaggcggtcaaggatcactcgggcgcgaagatagaatgcgaacccggaaagcttatcgttatggggtcgaatcatccgagcgtctatcggtctttgaccatcgagggcaacggcgctacgctgatctgcactaaagcggctcctgagggcgaagcgacattctcgatcgaatcgtacgcaagcttgcttgaagatacgacgctcaccatctcgaatctgaagaacgcgacggtttggggtcagcgcggcggcacctacggaacggacaagacgttcaccctcaagatggataattgcgacagcgtcgagggcttcacggggcagcgcgtgtacatcagcggagcggcgggcgtcaacaactatgaactgacgaactgcgattttgccggtgcggcatgcgctgtgtacagcaacgcagccggttccatcgttatcgatggctgcacgtttgccaacaacctcgccggtgcagtgaacgtcaagctcaaggcgaacgaggggtcgcttgcggtcgatatcaaaaacaccgccttcacggactgcggcataggcgacgagaacagcgtgctgtacgccgctcccgtccgctataccgccgaaggcgatgcgagcctgacaggaagcgttgccgattgttcgttctcgtattccgagggcgtcgcaccggccaacggcgacatcctgatcggcgaaggccgcgctaacgaaacgtccaagcttatcaccgtaaccgtttcggggactgcagccaacgcccagatccactatccgggcgaccgtcttgacgccgctaccaacaccggtcgcgcgattgcggttgaggctgacgagaccgccgtgctcaccaatgccattgcccaggttggcggtagcaagtatgcgagtctcgatgacgcggttgctgcggcgcagccggcggaaaccgtgacgctgctcgatgacttctcgcaggcaagcggcattatcgtcgacaaagatgtaacgatcgacctgaaccagaagaccttcaccgttaccgatggcagcaacatcaacaaccgtggaatcatgctgaaatcgggtcatctcaccatcgtcaacggaaccatgatcgccgatgggaaagcgatcgatctttcgaagagcggcgccgatgcgggcaccggcctctatggcatgttgcgtgccgagggcggcgagctcgacatggagaacgtgacgcttgaaaatagccgtccatggggtctgaacgtgaagctcacggggccttgtacggcgcgcctcaagaacgtaaccgtcgactccgagtacggcggcggcatcgaagtggcccacgccgatgcggaagcggtgcttgaggattgcacgttcatgcagaagggatatttcgattggacgagcacctgcgtgagcgtaagcacggggggcacggttaccgtgaaagggggcacctacgtatcggaagacggttatgcgctctacgtgttctcttcgggcggaaccctcattgtcgacgacggggtgttccagggtgccaaggccgtgctgaaagcggatcttgactcttcgtcgtatcccgacaacacgctgagggttgctcttaacaatggagagttccagggcgctatcagccagagcggcgatgccgagaaggtatccgtagaggtgtccggaggctactatacggttgaccccgcagcttatctcgtcgacaaaaagacggctttgccaagcgacaaagccgaatatcaatacatggttagcgagagcaaagcggcaaccgatgccaagcccgttgtcgtggagccggaagtgaagatcgaaaacgaggaggctctcggcgacaagaaggacgagatcgtcgaaagcgtggcgaaggcggaagtggcggggctgaacgctcatgcgaacgccgccgttgaagagctgacccccgatgcggttgcggaggcggaacaggctttgaaagacgccatctcccccgatgccaccgcgccgatcacggtgtacgttcaggcgtatttggaaattgccgcgaaggcgtataccgaagagggcggcgcgaaatcgctcgctctcgacataacgccgaaaacacgcgtcgtcgcaacgacggcaggcagcgttgacgatatcgtgttcgatgattcggggaggaacgccgttgtcgtcggcgagcctgttccggttgaggtgacaacgcagacaaccgtatcggtgccgcttcctgcaggctttatcagcacgacggatgacccggtattcgcaaggcacgtcaaagacgatggaagcacctacatttacacggctgcgctcagccagggttctgacggcaaattcatcgcttcgtttgcgaaccctcatggattcagcgaaatcacgctgatgacgagcaacgacagtgttgctacgaccgatggcatcgggtacgaaacgcttcaggccgccattgataacgttaaggacggcgggacgatcgaacttcagaaggacgcagccgatgcagtaatcgatcgcgccgtttcgttcacgctcgatgcgaaaggcttcgccgtcggctcgatcacggcagctgcgggctatgtgctagacgtccaaggcgatgtgtatacggttacccaggcgattgccgtaacgggtatcgtgctcgatcaaaccgccctgtcccttgaaatcggagccgcagcaacgctcaaggcaacggtttcgcctgccgaagcaaccgatccttcggtgacgtggaaatcgtcggatgaggcgatcgcaacggtcaaggacggtgtcgttaccgccgttgccgaaggcaaagcaacgatcacggctgcagcgggcggcaagagcgccgagtgcgaagtgaccgtcaaagcaaaacaagacgagcccgggaccacaagcgttaaccgcctcggcggcgccgaccgctacgccaccatggcccttgtctcgaaggccgcgttccccgacgacggctcctgcccgacggtcgtcgtggcccgcggcgacaacttccccgacgcgcttgcggccgcgagcctcgcgggtgcgacgggcggccaggttctcctcaccgagacttcttcgcttacggccgagaccagatccgagatcgagcgcctcggggcgacgaaggcctacgtgatcggcgacgagtggtcggtctccaagcgcacgtttagcgagatcgaggcgatcacgggcgacgcggttcgcctgggaggcgccgatcgtctcgagaccgcggtcaggatttacgaggccggcgaaggcggctggggctcgaccgcgatcgtcgccactggcaagaaggcggccgactcgctctccatctcgacggcggcctatgcactgaaggccccggtctttctggccgacgattcgggcgcgcttccgcaggctgccctcgacgccatcaagggcggcggtttcaccaacgcgatcgtgctcggagacggttggtcggtctccgaagaggccttcgaagcagtgaagtccctggtaggttccgtcgagcgcatcggaggcgcggatcgctacattacctctcagcgcattgccgaatgggcgctcgaccatggattcgcatgtaggaacgtggcgatcactgcgggacgcgacggcaagtacgccgacgcgctcgtggcttccgccttcggcggcaaaaacctctctccgcttttgctcgtagacgagggagacggcgccgatgtgtgcatctcaaaggtgctcgcatcgcacgccggcgagattgagaacgcctacgtgctcggcgacgagtggaccgtttccgaggcgcttttcgcagccatcgaaaaggcgcttgcgtaaagcgtttttttcgaagcgatttcatgctgctcgaggcccctggcatgcttgccgggggcctcggcaatttcatagctggcaggatctggtcgggaggcgaatcccgttgggaatcggttgcgcgtcttcgcctgggagccctgtggtatcctatatctgtaggatacgagagacggggagatgcaccgaagtgttcgatacgctgaaaatcgacgagaaatcgggcgttcccgtatgggtgcagattcgcaaccatatgtacttcctcattaaatctggtcagctcaagcccggcgacgtgttgcctacggtgcgcaatttggccgtgcagctgggtgtgaactacaacacggtacacaaggtgtatcaagatcttgaggccgacggcctcatcaattccggtcgcggcaagcgctcgaccattgccgatatcgatcacggttcgatcgaggcgccgggctctccggtggacatggtgatcgatgagcttttgcgcgtggccagagaatgcaatgtctccagggaagatttggaaatgaggttgcgcgagcgtttgtctgaatggactgcgtagcgccgcttgaggggaagggcctttatgggaaacgaagccgaggctaagaaatcgtacttcgacgaggatgaaagcgagctggcgagcggagcgttcgtcggcgccgatacgagtttcgaccaagaggtcaccagccgttcgggcgcagtggcattgcggtggatcatttcgcttgcggtgttcgcggcatgcgagcttgcagcttgggcgcttgcctcggtggtcgttgccgttgcgggagccatcgccgcggcactgctgttcagctgcatgcatgtggttatggaatgggagcgcgcggtggttatgcgtctgggtaagttcaaccgcgtggcggggccgggcttggtgtttatgattccgctggttgaatacgcggcgtctacggttgacatgcgcatgcgttccacggcgttcaaagccgagcatgtgctcactgctgatcttgtgccagtgaacgtagatgccgtgttgttttggacggtatgggatgcgggcacggcatgcaccgaggtgaaaaactacgcgaacatggtgtactgggtggcgcaaaccacgttgcgtgacgtgatgggcggtgtggccatcgcccagttgagcacaaggcgcacccagatcgaccaggaggtggctgacattcttgagcgcaagacgcgcgaatggggggttaccgtaacatcggtggagattcgcgacatcgagattcccggtgatctgcaagaagccttatccgccgaggcccgagctgagcgcgagtacaatgcgcgcataatactagctgaggtggaaaaggaagtatccgagatgttcgtggacgccgcccgcacctatgggcgtgaagacgcggcgttgcagctgcgcgcgatgagcttcgtttcggaaagcgtgaaggaaaaaggcggtcttgtggtggtgccaagcgctctatcagaggctttcgagggcctggagaagatcgcgagggggtagggctcggcatatagtcgaatgcgaaggagtcctcgtgcgctgcgagggtcccttggcgtgcagtgcattggctattggcaaagctgggaccaggccgatgcagaagagcggttcgtatgcctcaagcgaggaaatctcgatacgttagtcgtttcgttgatgcgcaatgctttgcacatgcgccgagcgtctttcgcttcggttgggccaggaggcgaaagcatccttttcggttgggcgggcgcgacggatggttcttcggtcgtgcacatccgtcccttgattatccgttgcggtcgatagcgcaacggacggcaatttgccgtttcttattatccttcaaaaagtatcatagtataatacgataagtatcgtatatttgtatgatatatgatactatgcggaaaacgggtgatggccgggcagtgcttccggttccgatgcccaggggaatttcaaacggaagaaaggagagggcgatggcgatgcgaaaaccggccatatggggtgccgcactctgctgctgcgctttgggagcctccctcgtcgcatgcgttcccgcagtggagcaagagacgactgatgcgccgcaaaacggtgcggtcgaacttacgggaggcgagaaatccgctgcaagcttggaggaaatccagaaagagatgaccggcctctgcgaggattacgctccaacggtggagacgcttgaggacggccgtcaagtgcagaaggttccaagcgatgccggtggaagtgcgttttgggcgtttccgagcgcatacaacgtctactacctcgatgccgaaaaccgcggctgcgaatcgtgccatcaagatggcctcgtcgatgttttggacaagcttccaacccgccattgggatatcgaaaacgggctgaacaccaataccgatgtcacggattgcctgctatgccacaatgaaaccacaggtgagacgcttgcgggtccgtatcagttcggcaatctcatccacggtatccacggcaaggattccttcaagggtgactgcatgacctgtcatgccgtcacctcggacggtacgggcatgcagctgtgggaagaggccaagtacgatgcgttcaacggcatggtcgatgtggcggacgttcaaggtgaattcgcttacgaccaggatacccttgcgggcgataccgtcgagatgacgaagtatgccggacccaacagcgagcccttggacaaagcctaccaagaagagcctgtcgatacgtccgaatatgaggactggtccattgccgttacaggcatgctggacaatccgagggagtggacgctggccgagttgatcgagagcgctcccagcgaaacgaccgtcagcaccatgcagtgcaacattagcggcgctggcggcgagtggatcgtcaacgccgaagtgaagggcattcccatcaagtggatcctcgaacaggcgggcgtgcaagaaggagctacgaccatcaccgcccacgatgccgaaggttggggaaccaacggtcctaccggttacggtagcggtacgtccatcgaggattgccttgaatcgggcggcctgctcatctacgagatcaacgggcgtccgcttacgcgcgccgaaggttttccctgccgcatgtggtggcctgggcacgccatttcgaacagcgggcgttgggtgagtgagatttacatctccgatgacgagtatcatctcaacgacggcatgggcttggagagcgagccgactgcaatcggacattggcatcccgccaaggaaaccgatgccggattcggcaacaaacccgttacgggcattatgggtaccccggaaggactgattatcacccctggcgaggaatacgagttcgagggctatgcctacgccatggacgagcaggtcacctcggtcgagttctcgatggatggcggcaagacgtggacgagcttcgatacgtccgattccgataagtaccgctgggtgtactggcactttacttagacggctcctgagcagacgggcggttatctgcttcaggtccgtgcgaccaccgaccagggtcgcgtgagctacgagcccgataaggtcatggtcaacgtcaaacagatgtcttaagcatacggtccgaaagcccgcgagggcgggctttcggcaaggaggtagagaatggatgccttgaaaaagacgcttgccatgggggcaagctcgatactggcggtcacgggcatgggcggcgttgcgctggccgccaccgcttcgaccgaagcgcagcctgtatccgatcctcaggccgtggagcggcaggagggcggttccgtcaacgatttcatcgtacgtatggacaaagtggggggcgagttttccttcacccaatccaaggtgacgtcaaccgatgacatcaaaaggaacctgggcgaggcgtcggcctatttgtgcggcgcaaacccgatgggcgacgggaaggccgttgcaatagaggactggtcgattgccgtgcagggcgatgtcgaaaacgcgtacacggcaacgttcggggagctttccgagaaggaagagcttcaaaacgtggtcatgggctgctcgtgtgctggcaacccctctgacgggcgtgctgtcgccaatgccgaagtcacgggcatttctgcgttgaagatcatcgagctggctcagccttccgccgatgtgaatacggtcgtatttgcttcgtccgatggttacgaggtagcgctgccgctggactatctcagaatgcgctactgcccgttggtgttcgacgtgaacggctcaccgatcgccgatgtgatgggcggcgtgaaccagctgtggctgggctccaccgcggcgagctattttgctcgcgacatagtgagcatcacgcttgaagagcgcgaaacgccaccggcgaaccctcattccgatgaggcgcgtgcggcgtatcagagcctgccgaacgtaggcgtactgctcggaggagaagttcgatgattcccccagtgcaaggcacggcaggccaggttctgcggttgagtggtacggcgtacgacttcgggcatcgtattgcggcagtccagttttcgcttgatgaaggcgagcactggaccacgcgcccgaccgaaggcacgaacgattaccaaaacgtgatgtggacgcttgatttcacgccgccgcgagcgggtgcgtaccgtatgcacgtgcgctcggttaacgagcgcggcgaagtgagtccgcagtccgcccttgtcgagctggacatacggtaggaaggggaagacatgcgacaaaccgtggatgtttcgcgcaggacgcttgtgaaaggcgcttttgcattaggcgcttcggcggtcatcgtgggtggcatcatggctccccgtcgtgcaacggcaagcgacgacgcatcggtggccgacgaggcgaacgccggtgtgcagtatggctttctcgttgatgcatcaaggtgcgtgaactgcgagaagtgcattgatgcgtgccgccagcagaatggcttatcggacgaaacgcccgaccgtcgccgcatcacggtgatcgtcaatgcgaagcgcgaaaaggtgagcgtatccacatcgtgcatgcattgcgctcagcccagttgcgaacgcgtgtgcccggcgggcgctatttcgaagggagcgtgcggcattgtctcggtggatcaaagcagctgtatcggctgcaagtattgttaccaggcatgcccttacgacgtgccgcgctacaatgcggaaaccatggacaagtgcgactgctgtctgggtgcgggcattgagccaggcgatacgccgtattgcgtgcaggcgtgcattttcaacgcgttgaagtacggccccatagaggagctgaaggagcggcgctcgatgcggtggtccttgcgtccgccaatgatccgtcgtgtctgattcgcggatagccgcgcagcgaaagaggaggtgatttcatgcttcaaacaatttggggatggcaaccagcgctctatctgttcttgggcggcatgggcgccggcacgttcgtcatggcggcggtgctctatctcatcgaccgcaagcgccatggtctgattatctgcgcgtctatgtgggctgccgtggcaagcctcggcgtgggtttgctgttgttgctttccgagcttacccaaccgttgcgcggtatgatgatgtggagcgcgttcgaccacttcacgtcgtggatgacctatggtgcatggggcgcattcggcgcgctggtcgtgttcggcgtatcagcccttttggctacgccacccatcgtgaagaggctttcgtcgaaagagacgtggtatgccaagcatggcggatcggtgcgtcgcgtgctcgccgtcgcgggcatcgcgctcggtgcgttcgtggcggtatacacgggcatgttgcttatgagttcgggcggggtgccgctgtgggatacgtggcttctgccgtgtttgttcacggtgtcggcgttcgacaccggcgttgcacttgtcgaactcatttcggtggtcgtctcgaaaaaggagcgtatcgcccataaggcgcaaacgctcatggaacgcatcgtcatcgtgctcgtgctgctcgagctcgcggtgcttgcagcgttcttttccgcgatgctcggcgccgataccgccacggctttgggcgccacagctgctcagtcggctgaaatgctgaccgctggcgtgcttgctccgtacttctggggcatggtggtggtatgcggtttagcgctgccgctgatcatggctgctatcggtctcgcatccaagaagaaagacgtgcgtgcggcaacggccatcggcgccatcggcgcgctcgtcggcgggtgcgagttgcgctttctcatccttgccgccgggttgcacgccaatctggcggcagctgcccttatggcggtggctggatagcgaagctcacattgttttcaaaagcgggcctctggcccgctttttttgcgtcctgttcgccctggccgggtgcgaaggtgccgagcgggaagcgggctcgggttcagtcgggaagaccgctttgcaatgcagtctactttacaatgtaaagaaaaggcgctactatttgctttacgttgtaaagtaagaaagagctaccaaggaggagcaatgggaggaaaggaattttccagacgagatttcctgcgaggtgcgggagccgtcgggcttgcttcgggtgcgcttggcgtattcggaaccacgggttttgcgtttgcggatgatgcggcgtcacccgaagaggctgccagcatctatcaaaccatcatcccaggcgaaacgacccttttgcctcttaagaaggcagagtgtccgggccctcgcggcccgatcgcctacgaggaccgcgaaatcgcggcatccgagatctcgtcgaccgaagagtgcgatgtgcttgttgtcggggcgggcatcgcggggttgaccgccgcgctgaaggcggcagaagagggtgctcgggtgatgtgcatcgagaagatgaccaagggtcgcggttgcttcgaatgcttcggcgcctacaacgcccaagctcaaaaagatgccggggtggaagtggatcccgcccagctgcttgatgagatataccgttctgcgtattggcgcacgcgtcccgagccggcgcgcacctacgtgttccgttcaggtgaagcgaccgacttttggcagcagatgctcgacaaaggcgaaaacggctttgtcatcacaaaggtggaacaggcgccgaacaccaacggcatgccgctcatcgattccgaactcggattctacgacagtccttcgcttccgcccgatgcgggtgtgcgctccggtctttcgggcatttacgtctgtcgcgagatggcggaggttgcaaaccaatacgacaacctcgacatccgctacagcactcccgccgtccagctcacgcgtgatggaagcgggcgcatcacgggagccgttgcgaaagcaggagaggaatacgttcagatcaacgcggcaaaaggcgttattcttgcaacggggagctacgatgccaatcccgaaatgatgcaggcgtgggttcgtcctgaagattatgcgacatcgagctggtggaatcccggctggggcacgacgggcgatgggcatatgatggggctcagggtgggcgcgaacatggattcgctgcctcatccggtcatgaacttccgctggggcaatcccgattccttctacgatgcgcgcgtatggacggcgatctggcttgccatcaacgtcaacgcaaagggcatgcgctacgtcaacgaagatctgccgttccaagccgtgtcgaacgcgcagaacgcgcaacccggcttcggtgcgaattgttggcagatcttcgacgatggcatgctcggcgccagcgaagaggaaatcgcaggggcaaaagaggccatggacgagttcatcgagaagggatgggcgttttcggcctccaccccgcgcgagcttgccgaaaagtgcggcatagatcccgatgggctcgaagagacgatcgggttgtggaacgggtattgggatagcaagaaggatatggatttcaaccgcttcatggagtcgacggctccgtttgccgggcaaacgatctatgcgcttaccacgaacagctgcgtccttgccacgggaggcgggctgatgatcgatggcagctgccaggtgctcgataccgaagataacgtcatcgaagggctgtacgctgtcggcaacgtgtcgggcagcttctttgcgggcaactacccgcgccatattcccggaacatcgatcggccgtgcggtcaccttcgggttcgttgccgccgaacatgccgtgaaaggagcgtaacccatgcaaaacgttaagcgatatccctttgcggcccttgcgatagccgcactcgtgctttgtctgtgcttcggccttgtcgcgtgcgcgccgcaggcgaccgagcagccgtcttcgccttcttccgggtcgtcttcggctgcgacgacgggggttgcgggcgaatacgtttctgacgagcagtgcctgagctgtcatggcggcacgtacgacgcgcttgccgaaaccacggcaggcttgggcgattggaatccgcacgatcccattcacggcggttacaattcctgccagaactgccacgccaaggacaaggagataaccgacaactattgcgagcattgccattcctatgcgccgtcgcaggaggcagccgcataagtgccaagccgcgctgccttgctgcagtcttcttcctcggctcggtgagttttcttccaaggccggcgcgcatcgattgcgcgccggccttcctgcgcggtgcccatgcgcggcggcgatgcttggatttcgtgtggttcggcgtgaggaaggagcgcctcgcgtatacttttcgaaacgatatcgaacgaacgacgcgttgcacgaaagccggtaccatgccagaaacgaagcagcagaaacaaccgctgagccgcgagcttatagtcgataccgcattccgcatgatcgacgagaagggctatcgcgcttttacgatgagggctctgggggccgaactgggcgtttccgccatggcgttctacgctcatttctcttcccgcgaagaaatgcttgcagccgtgtgctcgaaattcatggatacgctcgataccgatccgattcccggggagcgatgggacgatacgctcaggcgcacgatgccctcgcttcgcaacgggtatctcaggtatccgaacatcgctgagatcagcttggatgattcggttgcttggctcggcttggcgaagcatactgaaaagatcgtgaaccttcatctgtcccagggcatgcccgaagacattttcaggaaagcgtgggcgatggtcgatgcttttttgacgggctttacgggaaacgaagcagccatgatcagaagtgcgacgcaggatgattttcccgacgaggactctctgcccgagtggcagcgcgtcgtgcgctcggcctataccgatgaatctttcgtcaatggcatcgagatcatcatcgagggggtaaagagcatcgccgcccccgatccgtgcgagtggtatacgcctcttggcgctgccgatggcggggcggggcaaggcgatacgggcgaacccctggctagcgaggcccgatgatggcgaaagacggcggcaaagacaaacgggattcggcgatggcgaacggcgttggacgggaggccgtcaaacctgcggagtcccaaacgccgcttgcggcgtccctcgatgcggcgcgcaaggcggcggcttcaacggcggcggttttacgatcgcgaaccgattgcgccgatatccggcgcatcggcattccccgagctcttctctactatcgctacggcattctgtggaaaacgtttttcgagcagcttggacgcgaagtggtgatcagcgacgtttccgacaaggatgtattcgatgcgggggagcgagcttcggttgacgagtgctgcctggcctcgaagctctatctcggtcacgtgcaaagccttgaggggtcatgcgatgccctgttcgttcccagcttggtcaacaaggggcaccggaaagggtactgcaccaagtatcaggcgctgcccgatttggtggcaaacacgtttcccgatgcgggggtgcgcatcgtttcgctgctggttaacgaaacggaagagaagctcgacgagaagagcgctttcatagcgcttggccagcgtttcggtgcgagtgcggccgatgcgaagaaggcatatcgagcggcccatgccgcgcagcagcgcgcggatcgcgttgctgcgcgagcgcaggagcggcggattgcggagatagagcaatcgcgcaagcatgcaggcgagcgggatgccgacggcgtgccgtattctggcgaggcggcgcctttggccattctgctcgttgcccacccctacgtagcgcacgattcgtttgtgaatggcggcatcgtcgatctactcgaaagcatgggtgccgccgttctctatgccgacgaagccgatcatgcgaaagcgctccacgagagcttcgagttttccgaaacgctgccgtggctcgtcaatcgcgaactggtcggttcgatgacgcttctgcacgaacatgtcgatggcatcgtgctggtaagcgcgtttccgtgcggccccgattccatgaccaacgatgcggtggcccgctgcattcagggcaagcccatcctctcgcttaccgtcgatgcccaaagcggcacggcggggctcgagacgcgcgttgaaagcttcatcgatatcttgcgctaccagcaaaggggagggtatctcaatggctgaaaagctgcgggccgcacgccaggcggcggatttcgcctcagactctgaaaagatcgacgggcatgcggggctatccgatgccgtgggcgcttcggtgcgcggcggtgatgccgacgtgcgcaacgcgcgcatctggctgcagctcgacaagcttcgccccccaaagctcgtcgagccgcgcaagcggaagaaaaaggaccgccacgcccgcacgcgggttgctttttttcgctacagctattacgacatcgcgttcaaatactttgtggaacaagtgctcgacgccgattacgtcgcgcttcccgaaccgacgaagcgcacgcttgagcaggggacgcgcaattcgaacgatttcgtgtgtgcgccgttcaagcatattctcggtgatttcatcgatgcgctcgaagcgggggccgatgtgctcgtgcagtttgcggggccgtgcaggctcggttactacggcgagctgcaggagtcgattctgcgcgatatgggctacgaattcgagatgctcaacttcgccacgctgacgggaaaacccttaaacgaatacatcggcgtgtgcaagaagaaggtcaaccccgatctttcggtggcgcatggcgttcgatgcatgcttgcggtgttcaagatgatcgaaaacctcgacgaggcgaatgatttctatcttgcccatgcgggcttcgaggtggaacccggatcgttcgatcgcgcgctggccgcctatcacgacgacatgcgcgcggcggtgaccgagcgcgacatagccgatgctcagcgaagagggctcgatgctatgaaagccgttccgatatccaagcccgtcgatcctgtgcgggttggcatcgtgggcgaatacttcacggccgccgatgcggcaagcaacctcggggtcgaacggaagctgctggaaatgggggtggagctgcaccgcatgctcaacatgacgaatcgcaacctgcgttacaacgagaagaatctgcgcgcgggaatttctgactatgtgaaattcgatatgggtcccacgtcgtctatgaccattgcggctgccaagcgatacgcggaagaagggttcgacggcatcgttcatctgaagtcgtcgggatgcacccccgagatcgattgcgttcccgtattgcagagaatcagccgcgactattcgattcccatgctgtttctcagctacgattcgcaaaccagcgatacggggctcgatacgcgcctcgaggcgttttacgacatgatcgcacgaaggaagaaggttctgctgtgaccgaagcgtaccttgggatcgacaccggttccatatccacgaaaggcgtcgtgatcgacgccgaccgcacgatcatcgcccggtcgtatctgtggaccgagggcaaccccatgcaggcggcacggcgcgtgatcgaggatctcggaggccagatagaccatgacttcgttcgggtgatggcggtgggcaccacgggaagcgcgcgtcgcctcgtcggcgctatgaccgaggctgccgtagtgaagaacgagatcaccacccatgcggtgggcacgacgtttctgcatcccgatgtgcgcaccatcttcgagataggcgggcaggattccaagatcatctgcgtggagggtggcatcgcggtagactatgcgatgaacacgctctgcgctgcgggaacgggcgcctttctctcgagccaggcgcatcgcttgggcctcgaggtcgagcagttcggcgatatcgcgctcgcctcgaagcggccggcgaacatcgcggctcgctgcacggtgttcgcagagtcggatctggtgcacaagatccagatgggctactcgcgcgaggacatcgtggcggggctctgcaaggcggtcgcttcgaattacctcaataacgttggcaagggcaaaaaagttgtcgctcccgttgttttccagggcggggtgagcaagaacgccggggttgtgcgggctttcgaagaggcgctcggcatggaggtgctcgttgattccgacgggcacctgatgggcgccttcggtgcggcgctgcttgccgccgatgctgctcctgccggggtgcgcggggctgcgccaggcgcatcgggggcggctcattcggcagctgccgacgccgctcgtccgttcgatttcgacgtggccgaattcgagttcaaaacgcgtgaaatcgagtgcggcaagtgctcgaaccactgcgagatcatctgcgcctaccgagacggcgaggtcatcgacgcatggggcaaccgctgcgaaaaaggcgccgtgaagactgcgcggtagccttggcgcggtcgcttgcgtttcgatagtgcgataagggtttattcctttggcttctcgttgatgatgtcgatcacatcctgcttagagtgcacgccgagcttttggtagacgtttttgacgtgcgatttcacggtgttttccgaaacggtgaacttctccgccatgtactgggtcgaacggccctgggcaagacagccgaggatgtcgctttctcgcggtgtgagctgggcctgtttggaaatttcccggcagcggcgctcaacgcggtcttcgacgatgtaggtgagaccgttcttgcgaaaaccgccttcggatgcatcgccgtcttctcgatcggccgagtagtcggcgatgcttcggtctttgagcacgaacagcacgatggttgagagcaggtagacggcgacaagggccagcgccataatggcgacgccccccgtttcgatgaatcccgagaacgtgaagccgattgcaacgccgagcagcgaagcgaacccgatgaccgcttcgctcgctccgtagaggatgagcgcgggcagttttgtctggtgcaccacattcgcgatgatgcaccaggaaatgacatcggagatgagccagcccatcgccaccatcgaattggctaccccgccgccgctgttccagaaaaacgcaagcagaagaaagcctcccgccgcaatcggcagggcgatgcggtaggcagctccgatatcgatgcgcttcgggaaaagcagtgcgggcaggatcatggccacgacgacgagcaacgttaccacggtggatgtccagcgcgcctcgtcgacgttgaccgattgctggcccgaaacgaacagggtgaggttgctcatgaaggcgaacgttgcggtgatgaacaccggcctccacagcgagctcagtgcgccgcgcagcgctgcacgcgacggttcgattgcttcgatcgcgcgggtttgcatgcttcgcttgagcattgtggggattacggcggttccgacgaccgcgatggcgaggatgatgagtggcggaagctctacgaagagcgcgtaaaacaacagggacacgatgtacgaggacagcacgaacaggtagaccgcgcgaagcgacagcgttccgcagaatcttccccataacactagcatcagggcatcgccgacgccgagcaggcacgccgcgatgccgagcataagcgtgctttccgcagggccgaagctgaattcgcccaccctcaggatgatggtggaaagcgcgattccgataacgatgagaagtgcggtgcatgcggaaagcgtgcccgttgcggagagcgcgggctttttgtatgcggcaatggcgcagattgagaacacgatgattttgatggcgaagaatatgccgagataccatgcaggcgatgagccggtcagtccggcttgacccataagcggcatgacgtcgtgcagataggagaagctgaacgcgaggtagagggcgaagcctatatggaacggcctgacgcctccgatcagatcgcgtatgcgggcgaccgctgagcccatggttcttcccccgtctcgattcaagagcttcgaacagattgtagccgaaaacccgtattggagcgcctcccacccgtcacgggtgagattgatgatagcttactttcctcccgatttcatcacccgcgggtgtagcgtcgccttttcggcacccataggatggcggtagcagtgaaagctgccggacatgcggccgaccgggaggatcggaaccgcgccgatcgtgcgaagcatgggaggtccggcgaaatgagagaggatcataatgaacgaaatgaagcaaggtttgagtcgacgtgcgtttctgggccttggagcaactgctgcggtggcggcgggcgcggcgggtcttgtcggctgtgcgcctggctcgggaaccgatgcgaaagagccggccggccaatcgacggcggctggtccggcatcgggagaacccgccttcatgaccaagcccgaagttcccgcagatgttaaggaaaccaagagctgcgacgtgctggtaatcgggctgggcatctcgggcatcgttgccgcccgtgcggcttccgaggcgggcgcgagcgtcatcggcattgaaaagcaggcgcaaatcgggaccatcgggctttccggcgacttcggcatctacggctcgaaggttcaagaggagctcggtatggagctcgcaagcaaagaagaggttgtaaaccagctcatgaaggacatgacgtttcgtccgcatgcctcgctgctggggtattggtacgatcattcgggcgaagacttcgactggctcatctccgaatccgattacgagctcgttccgacttcggcaactccggcaagcggcgagaaggaaaacgtgattcgtccgaagtgctatccggtgctcgagggctacgatcgttccgaggagctgttcccgttcttcaacggctccgttaccaccgaaccgagtgtgggctggtgcctcgaatcgtgccagcagattgccgaggcaaacggcgccgagcttatattcggcatgttcgccgagcagctgaccaccgacgagtcgggacgtgtgacgggtgcgtacgtatacgacaagagcggcgaatacaccaagatcgaggcctccaagggcgttatcctgtgctgcggcgatatttcgggcaaccctgaaatgctcgactactatgtgccgtgggttgaaggcatcgccccgttctatcccaacgtcgacgtgaagggcaacgtcgccaacagcggcgacggccaccgcatgggcatgtgggctggcgcacacatggaaaagggtccgctcgctccgatgacgcatcatatgggcgcagcgctcggcgtggatgcgttcttgcagctcaacgtgcgtggagagcgtttcatgaacgaagacattcccggccagaacatcatggaccagttgagcacccagcccgagatgcgttcgtggcagatcatcgattcgaagtggcccgagcagctgagcgtgcagggaacgggccatggctacgtgaactactacatccccgatagcgaagccgatcagtggcccgctgttgtgggcgaggagatgagcgcgagtttctccggctatacgaccgacagcatgttcgaggccgcgattactcacaaagccgatacgctcgaagagctcgtcgagatgatgggtcttcctaaagagacggcgctcgcctcgatcgagcggtacaacgagctatgcgcgaaaggggtagacgaggacttcggcaaggatccgcgccgcctgttccccgtcgagaacgggccgttttacgcgtgcgaattcggcgatgcgggcatgctcgtttgcatgggcggcctcgataccgatgcggaatgccgtgcgctcgacgatggcatggagccgatccccggcctctacgttgccggcaacaccatgggcaaccgctataaggtcgaatatccggttaccgaagcgggcatcagccttgccacggcgctcgtgttcggccgccttgcgggaacgaaggccgcggcgggcgagtagcggcattggtttcggctcggtcgaaaccaacgaaaaccattcacgtaccgggcgcatccgatgttcctcttccctcccgatcggatcgcctgcgtacctatgcggcttccaagagaccgcgtcgtgcgaccctcgcttcggcggggtcgccgtgcgtttacgttggggtggggtcgttttcggaaacgtttccgtcgggaacgaattccatgagatcgcctggctggcagttgagggctctgcacagggagttgagcgttgtgaagcggatggctttgcccttgccggttttgattctcgaaagattgacgtggcttatccctatttcatcggcaagatctttcagcagcatttttcgatcggccattatcttgtcgagtctcatgattatcggcatgattgcctctctctatccatacggtgtgggtttgcatgcaaagggcgtgcttgttttgcgtaaaagctgatcgaaaaggtttgattattgctatcgcaatgatagtcgcctgcatatcatcacgtcaaacagataaaagcaatactcgatgcttttgttttacgttacccattatcgattgaatgccaaacgataaaattgcagttgcttgtgtgctagccatggctatatactttagtcatacatgtaactgcaattagaatcgaaaggggagtcaaatgctgtttcatagtgatgcaacgccgtacggatcatgcacggtcatcggttgggctggggtttgcctgagcatcggcctctaaggtgcgttcgtgcgtcgagaaccttgttgcaaagaggcttaggcgattgcagcaaggttcatttttttgttgctactttgtaccaggcttctgtattcttaattagttagtaattggcttacgcatgtgaaaagtagcagttacgttcgtctaaatatgaatggggagttatggtcaacgaggatatgcttgaaaccgagaaagctttgcgtcggttgatgagaattagcggaatgattaggctattcttgatcgcattcgcttgcttgctctccgtgttgcttgttgtcaagatcggggcagccgttgctgcgcttagcgccgaatcatctaatgggatatttcaagccgtcgcaaagattgttcttattgtcatcaccgatggtattggaatcgtctgccttttgattggctcaagtgtttttgctgcactcaagaaaggtgacgaacccttttctcggcgtcagtctagggtgattcggattgcggcgctgctgcttctgattgacgttcttcttagcacgcttggcgcagttgggcttccttggtttgcgcaatatgggcaggcgaccgtgggcatattgccatcatcaggggagacaacccttattcccatcaacgcgggagagatcgttattgccggcattcttctgggcctttcggttatctttgattatgcgaggattcttcagaagctttccgacgaaaccctgtaggactctgcgaaatcgtggcgggcttcttcttgcggtagagctcgctttccgatgttcgaaacgtctcgatacgtcatttcgagaagcttcccctgatagcctttggaattcatgcacgccaaagggtcgattttgccaaatcgtctcgacagtcctgcagaatgtaagaagttcttgatttggtaagcttctgtccagtcacctgaactgggatttctttagtgcttagtttggcgggcggcgtgagcatggataaatgcaagcaaaatcatcgatcgaagcgatgttgcggcataatggaagaacacttcgatttgaaacgaggatgtccgtggacgccgatttcgtaaacctcactccagagaatctagccagcgagcatctgtgctgcatcatccgcaccaagaagcttcatcccggtgtcgaagcgaaacgtcaatggctttcggatcggctgagcgaaggccatgtgttcagaaagctcaacgcaaaagcaacggttttcatcgaatacgctcccctggaaacggcttgggttcccatcgtcggcgataactactactacctgtactgcctgtggacgtatggaagcttcaagggcaaggggtacggggaggcgctgatgaagtattgcctggccgacgccaaggagaagggcaaatccggcgtatgcctgctcggcgcgaaaaagcagaaggggtggctcaccgaccaatcgttcgcgaagaagttcggtttcgaggttgtggattccaccgacgatggatacgagctgctcgcactgtcgttcgatggcacgaagcccgcgttcgccccaaatgccagaaagcaagagatcgaaagcgaagaactgacgatctactacgatatgcaatgcccctatatctaccagaatatcgaaaagattcgcgagtattgcgaatccaacgacgttcctgcatcgctgattcaggtggattccctgcaaaaagcgaaagaactgccctgcgtcttcaataactgggccgtgttctacaaagggaagttcgtgacagtaaacgtgctcgatgtctcgtacatcaagaagatgatcgaaaagtaggcggatcatcccttacttactctgttcgctcatgcgagtccagattgctcgtctttgcgcgagacgagggttcgctcaaagggaaaggccgccggttttccagcggccttttctgtggcgctaaaacgggtttacgagaatacgacgatagcgcgtggatctttgatgcgcagcgcagcggtttccataacgcggaagtggtggttgaagtctgcgagctcaacatagcccaccgagaagtcgaggcctacggcgaggtcgatgtactcgggctcggcgcagacgagaacggccttgccggtgccgaagctcccgtacatgtacacgttgtcgccgataagttttttcacgcggtcgatttcgagcatgccgagcgagggctgcaaacgctgcagatcgagatacacgtcggggctcactacgagagcgtagcgtccgagatagccgtttttcgccagttcggcgaccgccttcgctacgtcggcatagccgttttctccttgcttccaatcggttttcttgattttggccgcgcccttggcgttcacgagcccttgggttcccagagtggagttgccgagcagaatcagctcgtcctcgcgacgcgctgcctgtttggcggcgcgagcagcgcttgacagatcaagtgggtagcctgtttgcttggcatattcgagatcccgtccgaggatggtgaaatcttcgaagatcatgggaagttcgagctgcgtgcggccgacgatgcggccgagcccgttttcgagcacttcttccttcgcaacgccgtcaactacgaccgaggtggggccggggccgatggggccgaatagcttgagaaagcgtcggcagacgatctgttccttgattgcgtcgatgacggttttgtcgatctgctgccagagggcctcgggcagatcggcgctttcgcgtgccagataatccatagtgatcacttcctgttcgggttattcggaaaggtcgccgacggtcgggcccgatgcgggcttcggggcggcatcgatcctcaggtcttcgagcatttcgttgacttcgccttcgccatccaagaacagttcggtttcctttggatcgaggtagcgcatgagggtgatgagttctcccatgtgggctttttcttcgtcgcggatgtcggcgagcacttttttggcagcgggatcgtcggttgccaagtagtgggattcgtaaaggtaaatcgcctcgagctcgcctgcgatatcgaggcgaagggcctgcatgagttcggcgttcgacatcttacggtcgacgttgcctgcaaaggggttcgcaaatgacggcatgatggtctccttctttcttcgcttcgggcgcgcggctgcaaagcttcgggttctttcgccattgaaccatcataggctcgcggcagggcgaatgcgaagagcgttcccgaacggtgctggcgctgacaccgtttcgtgatttcatatgcatgattgtgtgatatagggttgcgggcggttgccgatcgcctatgtggctgcttcgagcatttgcagcaggtagtagggaagtccgtaagtgattgccgtcagcagaaacacggcaatgaccacggcgacgaagcgtttcttgcgcatgaccagtagtgcgatgaattctctgagcagtgcgttcggaaggtaataccatgccgtcggtgcgccgatcccgtcgatcttgagtcccgccctgcgggcgtagatgcccgctctcatcacgtggtagctgctggtcgagaatatggcccgatacccctgtggcgagcgcgtgtccatgatcgctttcgaaaacgccatgttctcggcggtgttggtcgatttcgtttcggcgatcagatgctcggcatcgtatccggctgcaagggcgaaggcgaccatcgcttcggactcgggaaggggttcatcggctccttggccgcccgacatgacgagcacggggagcttgcctgttatcttctcctgtttgtgggcgaattggattgcgcggcgaatccgtcctgcgagcagcggggtaacgcgaccgtcgatgaggccgcttcccagcacgatgatgtaatccttgtccttcctcgggtgagcaatcgagcagagggcggaagtggtaaggaagacgaacacaacgaaggtgtagattgtcacgatcgaaagaacgcccgcccaaagggcttgcagccacatcggcagcgattgggacgacattgcccaagaaacaagcagaagcacgatgatgcctatggcggcgatgagcgtcagggaattggaaagcgagcgcccttctttgcgaaacacggtgcgagcattgtgcagcaaaaaggcaatcaggatgtatattccgaagaggggtacgatgagggcaagcccgaaaagtgcgataagcgggtagaggagaaacgggctttcgggataggttatgacgatgatcgcgtaggtcgagatcatcgcgaaaaggaacgcgccaaacgtaaatcctgaaagaagactcgtcttgtttgtgcgatacaccagcaaaaacaagacgaaaaggattgccgttgcaacgagcgatagggcgatgacgttcatggcgcaagcaagttctgttactgcttgacgatcatgacgggcataggcgcggtgcggagcacatggttgctaacgctgccgaggatgccgcgcaaagcgcccaggccgcgcgatcccatgattacgaggtcggcgccatgctctttcgcgtaagcgacgatctggtcgccgggaagcgtctcttcgacgatgtcgatgcttacccgattgcctccggcggcgatgatcgggtcgattcgatcgtgcagttcggcatcggcttcgcggattacttcgtcgaacagcgcccttagcgcttccgacgagggcttaggagcatcgggcattccgctcttttcctcgagcttgtcgatcacgcgttgttcggtatcgactatatggaggatgcgtacgttcgaatcgaaatcaatggaggcgattttcatcgcctcaagcagcgctgcatgggccgattccgaattgtcgtacggtacgactatggttttgtacagcatgcgattgcctcctcgatagcgccgatggaaaacattatagcgaaacgcgtgctcccgcgaagagcgtgcatgttcggttaccgatccgagaagaagagggcggtttctcaggccgccgcaaagcgagaagcctgcgggccgcagcaccgcgcaggcttctgcatcaatgaaggcttgcgtttgcgaagcaaggctattcgccgaacatgtccttcgcgagggcgagaccctgggacatgacggcaacgcccgccattccgcacgcgcattcgccgagggcgcgcaggccttcgataaccgtgccgtcttcgcgaagcgcgcggtagcctccgacgacgtcggtggtgatgccgcctgtcgtgatgtgcatggcccaagtgcgcggcgaggcgtagaacggtgcgttctcgatcgggctcaattccgaaaacacggttctgccgaaatcgggatcatctcctgtgcgggcgatttcgttgtaccgatcgatggtttccttgagcgtggtcgggtcgcaaccgatctgctgggcaagatcttcgatcgtatcggcaacgtagagctgcttctgatcgatgaggttttgcatgtctcgtccgtagcggttcttgtcgccttcgacgcggctcgtatcggcatccgaaatcatgaacatcatctggtcgggctgggccatgatgttttcggtcatggtgtatcggtcgagcacttcattcatgaagcgcttgccttccttgttgacgatcacgcaatcgatgtcgtctccgacggtggtttcatcggttgcgttctggcagtcggcgaagggaaagggcatctgcaggtgcatgagcgcaagcccgcacccgactgagaggcccatcgtaatgccgtcgccgtcatggccgtagcagttggttgttggaatggcttgcgtgtccgaccaattccagatctggttgtattcgcgaagcatgtcgggattgcccgagaagccgcccgttgccagcacgactccgtttttggagcggatgttgtaagtcgtcccgtcttcgccgacggcgaccagtccgacgaccgcattgttttccgtgatgagctcggttgcgggcgtggtcagcatgacctgcacgtcgcatccgttctcgattgccttatcgtagaactggaagtagctttgcccgcagcggccttcggcgggaacggcccagcgcggccaagggtatccgacgatgccgacggtctctttgaacttgaagcccgaatcgacgagccaatcgccgaaatctttctcgcgagcggttacctggtgggagttgtcgaaatcttcgcaatcggggagattgtactcgacggattcgaggatggcagaatcgaagcatttcgtttcccccgaggcctgccagtcggcccattgccgcttgagctcgtcgaggtagcttgcggggatcgaagattgctctgcggcggcgatcttgctgtcgacctctgctttttgcgcttcggtcatatcggggcgcagttcgacgggggcctcggggtattcaaggtatcccccgcaaaccaggccgttgccgccgatgttgcagctcttttcgaccactatgacctttgctccgcgctgtgcgcagcaaacggctgcggccatgcccgatgctcccgctccggcaacgacgacatctgcttcgagatcaacgacttcggtcgatttcgcggggggttcgtagtttgatttgagcgccttcgcatcgccgcccgcctgcttcacgcaatcttcagctgccgtgagaatggccatgctggtgagcgttgatcccgtgacggtgtcgatgttgagggtctgatgctcgacgatgttcgcagggatttcttcgattgcccgatcggaaatgtattcggtctcttcgtgcttcaccacgcgtgcgctggcgatggagccgtcttcgaaggtcatttcaacggtgatgggcgcaaacttgccctgcgcggctgccgtgtaggtgccggccgcatagccggcttgctgatcgctttttgctgcgggcgcgcatcccgcaaggcccatgacggcgatcgatacgccggcgatcgttgccgtcttgacgaacgtgcggcgactcatgggtgcatgcgatgatgcggatgctggtttcggttccataattcctcccgggttgtcctgtgcggattgtgcgccaactttgagcggttggccgttcgggtcgcagtatgcaggcaaacggaacggcgcgcatctccccatggcgcgttgcggggtgtaaatttgtaacccgcgtgtaaaccgacccgcgaaacccttggtcgctgtatataatgcttgcgggggtggaaaccgtgcaaaccgaagccatgttggacgataaagctgaacaaggtgccgatcagccatttgcggtgaggcggaagctcggcgatctcaggcatctttccctgtgctttttcggctttgccttcattcgggcgtgggatgacatagcgttctaccgcttttcgtcgctggtgcccgatcaggcgtggattggacaagatctgttcctcctcatgatgatcgcggtattcgctccgttggccatcttcgcgcgcaagatcgcgcccctgtacgaaaagcgctgggccctgcctgttgcaaccggttcgcttatcgcttcggcggcgctctgggtcgtcggtgcgggtgcgggcgggttgagcgtgggactttcgggcgcttcgatcgtctgcgcgggcatcggggcagcgctctcgattcttatgtgggctgaactgcagagctgctttaatccctttcgcgtggtgatctacgtttcgggcgcgtttttcctcggcgccatcatgggttggctgttcgtggggatgggggtcgagcggctttcgtttgttatggtggcgctgccgctgctttcgttcgcctgcctcaagatcggattttccaagatcccgaaaacggatttgccgaagaagacatggggtaagatgcgttttccctggggtctcatcatcgtgctcggcatctaccagtttatcttcgggtttcacagtgcggacgacatctcgatggtgagcccctcggtgtggggcacgatcatcgcttcggcggcgctgtttttgggaacgtacctgctgtcccatcgtttcgacttcacctttatctacaggacgccgttcgttctcatgacatgcggactgttgattacccttttggcgttctcgaagagcaatgtggtgggaagcctgttcatttcaaccgcgtatacgtcgatgtttctcgtcatcaccatacttctgtgcgacatatcgcatcgctacggcatttcggtgcttgtgctatgcggtatccaggaggtcgccacgatcacggttgtcggtggagatttattcgaaagcgctatgaattcgggcatccttcccgtgcgggccgacgataccattgtgatcgtggccctgaccatcctcgttgtcatcgcaacggtggcgttgctgttcgaacgcaaaacatcggaggaatggggtctcgcgtttttcggcgccgacaagattgccgaagacggcgatgcaaggggaaggtttgcgctgcgctgctccgagcttgcggatcgctatcggctttcgccgcgtgaaaaagaggtgttctggctgcttaccacgcagaaaacccttcccgagatagccaaggatctctacatcgcaaccggtacgctcaaatcgcacacacggcggatctatcaaaagcttgatgtgcacagccgccaggagatgatggatttggtcgaggttgattcggtttccgaagaagaaaagctatcgtagaggaagtgcggcggggttcagcccgaacctctttacgcagtgccgagcgcttcccgcaaagcaagcacttcgtcttgctggttgcgcacatctatacgcatgcgctggaaattccacgcggtcatgatgaagcagaagatggtgtaggcgatggtgatgatgctcttctcggtctcgaacagcgcaacgatgcccgctttgctcgcaaaagcgtacgccatgatgaacaggtagggcacgagcatgagatactcgaagcgatagtagcgcgccacgatgtaggtgcagttcttgaacaggcgcttgctcatgatgaacagggcgataccgcagtgcatggcgatgagcgcaccgaaaaaccagggcatgggaacgaactggagcagcgtgatgaacccgaaggtgagcaatgctgcaagcgcgaacagcgtgagccccgtcttcgtggtgcgaggaatatcggtcatatcatccctttcttggtgtacggcatgattaaaccgtctcggccttctccccgatgcgagatcgccgatttcctcgaaaaactcattaccttggaagcacgtggccagatgtctgcggaatgtcgggaagggcgcccctcgagtgcgaggcggctgcttgccgaaggctttggcaggccttcggcaaacgaagagtctgctgcccgccgaagacttgatcgacaggcggcatcggggcgaacgtttcggacacaacgccggttggttctctcttgccggaaagatcgtcgagctgcacgggaccatcggattcaagggcggactgaacgggatgcagatgtaatcgtgagattgcctggaaatccgagcgtctgacggaccgcgtggtattcttgacggattcgaagttgcttgatgctaacaaaacggttgatacgatgctgattgccgtgcgctcgaccgtgcgaaaggatccgatatggaaatgttcgagctggttttgctccttttggcggcggtgctggtttcgaccgtcttggatcaggtcactcctcgcgtttccctgccgctcgtgcaaattgggctcggcgttgcgatagccgtcatcgcaggcgcacctttgcaggtggagatagatcccgagcttttcctggttctcttcatcgcgccccttctgttcgatgaatcccgccatgcgagcaagcgggcgctgtgggagaacaagggcgccatcgtatcgcttgcgatcggccttgttctgataactgtgctcgtggtgggttttgcgctgcactggcttgagccgtcgattccgcttgctgccgccttcgcactcggcgctgcgctcggtcccaccgacgcggttgccgttacggcgcttggcaaagatatcagcttgtccgaccgccagaaggcgttgctttctggggaagccctgatcaatgatgcttcgggcgtcgtttcgttccagtttgccatcgcagcggccgtaacgggggtgttttcgattgcggatgcgacggcaacgttcgccatcagctttttcggcggcatcgccatcggccttgtacttgggctcgtggcaacgatcgccctgcgcgtcattcgcagccgtggtttcgaaagcgcgacggtacacgttgtgttcgaggtgttcactcctttcatcgtatttctcgcggccgagcatacgggcacgagcggcatcctggccgttgtggcggcgggtttgctgatgacgctcttgcctcgcaagacgacgcccgtttcggcgcggcttcagattgcatcgacgagcgtgtgggatgcgcttgtgttcgtcatcaacggcgtggtgttcgtgtttctgggcatgcagttgccgaaagccatcatgccctcgtgggacagcgggcagatgagcgcatttacgcttatcgagttcgtgctgctcatcactcttttggtcgaaggaattcggtttgtctgggttcttgctatggaggcgtttcattgcgatccgaaaaccggaaagcttgcgttttctctgaacgcccagacggtgagggggtctctcgttaccacgcttgccgggcccaagggcgccgtgacgctctcgattgctctgacgattcccttctaccttgcaaccggcgaggcgttcccgtaccgcgacactttgatattccttgcttcgggaacgattctctgtacgcttttgcttgccaacttcgtcgtgccgctgcttgcgccgaaggcggaggcggagccgaaaggcgatgacggatcggcgagtatcgagatactcgataatgtcatacgcgagctcgaggcgcagcaagccgaggagtcgagagttgcctatcagatcgttatccagcagtaccgggagcgcgtgaggagattgcgcaggcagaacgcttcctcggcgtgtatggccgagcttcgagcggaagcgcttgattgccagcgttcgtatgtggaatcgagcatggaaagcaaaacggtcgatcgcgtcgaagggcagcgttatctcgagcagatcgagcacatgcgcaagatgctcctgcgtcatcacgcaggacgcgaaacgatcggagaactgtgggggcgtttgaaagttaccgtcgtgcggcttgcaaggaccgttttccatgtgcttaagcgcctgcagcccgaagaagcgtggcaggatgcttcgagaccgttcaggatcggtttggagcaatgctctctggaattctacgagtcgaagatggccgattccgacctcgaggtttccgaaggcgcggcagtccttgccgccgaatcccgcgctatgcttgccgcgttcagagcccaagacgaggcggaatccgaggggtttgcgtcgtcggtcgatcctcgttcgctgcgcaggggttcggttgatagggacgagttgaaagagatcaaggcccgcgttgccgatgtggaggccgaggcgctccggctcgaactcgacgagattcagcggttgcgtgaaaacggcacgttggatcgaaataccgcccgcgatcttcgcgaagaggtgtacctgcttcagatggcgacgggggaataggctgcgggcttgtgcgccttgccgggctatcccgccctcccgtgtttccgcaccgcttctcgcagctgatctagaaacagcttcgcagcgggggagagcacgcggtacttctttgcggcgatactgagaccgaccgtcatgagcgggtcgagcggtcgaaacgtcaggttgcgatttccgtcggttgagacgaggccgtcgatgcaaaatgcgtagccgagtcccgcttctaccaaaaaggttgcattagtgagcaggttgtaggtggccacgatattcaaagattcgaaatcggcgccgaaccaatcaagccgctgatgcccgctatggggctggttggggaagatgagcggtagatcgcgaagatcgtcgagcgggatcgatttttgctcggcgagcgcgcaatcgcgcggcatgagcaggccgtagacgtcgctcattcccaaatcaaggtagtcgaacttttcatgatgcagggggccgagcagaaggccgaagtcgagaaggcccttgtcaagccgctccataacggcatcggcgtcaccgctgtgcagatgcagccgcatgttcggatggtcttcgcgcaaatgtgcgaagatatcgactacgaactccatgatccgcgtttctccgcagcccaggtagacatcgccgcccgcggtttcctcttcgtcgcgaagcgccgcttcggtgtgctccatcaagtcgagcacttcttgggcgcgattgcgaagataggcgccctcgtcggtgagcgtgacttgctttttgccgcgaacaagtagttgaacgtccagttgccgctctagatccatcatctgttttgagagggtcggctgcgtgacgtgaagggcctcggcggctcgcgtgatgctctgttcgcgagcaacggccagaaaataatgaagcagtcgggtttctatcacgggtgctgtccaatcattctttttatctatgtttaaacatagtacataactattggctatttttaaagagcatgcttaccattcatacgggaggcgaaaccatgaaacgatcgagtgattgctggccttgcgattccgatgcagacctgaagagaatgctgggcgaatgcggatgcgatgccgagagcatcgagcggcgtctggcacgcggctgcgacgaccgcatcgacgacctgatcgagatgctcaggggaaaacgccgaacgtacatggaagatctgcatgcggcgcagagaagggttgaccgccttgattatgttatccgcctgctaaaacaagaaaagagttgagagaagacggcggcactgaaaagcaaaagaatgctcctgatacttaccctgggggtgttcagcatcatcaacaccgagatgggggtggtgggcatccttccgaaccagcatctcatcacctctgctgcaaaggaagcgcccgattttgcaaacgggctgttcctggcaacgaccaatctgggcacgacggtgggcacgagtctgtgcggcgcgctgatagccggtatgggtacgggaagcatcgtgctcggcggcatgaccttcgtggcgagcgggtttgcagcggtgctcgtgcggcagtgggcgcttgggcgcgcgaatgcgcaggtgaaaaactcgaagcgatccgttgctgcgactgccggcatggatatgaaagcaggtgaggcgaagtgaggaaagcggcagccattttgacagccgtcgcgctggcgatcggcgttcttgcggggtgcagccacttcgcggcgtcggaggatgcgggcgaagccgccgatcatgcaaccgagcgaaacggttaccaagcgggatccgagcattcgggttccgagggggatgcgccgtctgccgccgacgcggtgggtgacgacacggcacgcgattcggcatcgatcgaagcggatgcggggaatgcggaaggaggcgatgacatgcagacgaacaggatcgaagtgaaggcggacgatgcgactgtcgtgttcgagttcaacgacagcatggcagctcgcgagctctacggccaattgccgctctccgttgaagtggagaacttcagcaccaacgaaaagatattctatctgcccgagcggctggacgaaggcgatgcgccacacgccgaaggcggaaagggcgtgcttgcctactatgccccctggggaaacgtggtcatgttctacggttcgttctcgccgaatcccggcttgtacgaactgggcgaagcggtgtccggcgcggatggcatcgcaaatctaacaggaactttgacggtttctgccgtcggatagggaagggtcgagcctttgaccgtcataaaatgctgcatttgcttcgatgcggccgtcgggttcgggagccaagtcaacatgccgatgggcggatgcggcagcggtgcgcgagctcccgagtattttgtggggcaggtttgcgaatctctcttgcttcaagaacccaagtcctgtatcattttcacttgctttcggccgaggtcgaatggcaaaacaaatgcgggtgtggcggaattggcagacgcgtacggttcaggtccgtatgggggcaaccccatgaaggttcaagtcctttcacccgcaccattttaaaacagcaggtcaagcaatgaaaatgcttggcctgttctctttttgcggcggcgaatgtaccaaacatggggttagggttataggccaaacgtgtgtgccaagcggagttgggcgcatgcctcgtctccgtttggcgctgccgccttgtcatgtgggttcgcccagcgatgcgtgccttcggcctgacaggaaccgcatcgccgaaagccgtttccgctcggcaatatatcatcgggcctgttgtatattcgttgcaaccgatttgctatcttggtgtctcatgcgatcctatacggtattcgaacggaaggcgaagtatgacgatgcgtaccaaatgggcgggcgcggcgggccgcacgctgctcgcggggctgctcgcgacggcgctcttgcccgcggccgccatggcaagcccccgaaccgacgcttcgggcgacaatgcgaagcacgaggccgctatccagatcatcaacgagatcgcagcgaagtccgctgcgcgcaacgccgagcgcacgtatgttaccgaagacggcttcgagttgtacctcggctcgccgtcggcggaagcgggcagcgcgcgggcgctctccgtccttccggagaaatacacggctccctacacctcgatcaagaaccagggaacgacgagctcgtgctggtcgttcgcatcgatcgccgcgctcgagtcggcccgcctggtgcagcagggcatatcctccgaaggcggcaccgaggtcgactggtcggaggcgcacctggtgttcggcacgttcaacggcgagcgcgagggcaacacgctcgacggcgacgagctggaaacgtcgggcaacgatcatcaaagtgtccaagacccgtattacggcttcgataccgccggcaattcgaacatggctgccgccgcgctcgctgcgggccgcgggctggcgaacgagtcggatgcgcccttcctcacccctgatacggatgacgagctcgccgactgcgctttcgccatggccgaatcggcggtgggaaactacggcctttcccgtgtgcgcctcgatcgttcggtgatgcatcccgaggtcgcgcccttcatagatttcggggacgggaccggaagcggcgtcgaccgcgatctcgacgtggccgccatgggcgaaatcaagcaggctatctacgagtacggcgcaataacggccctgtaccactccgagacggatctgttcagcccttactaccatgagtacgtggagcctcaggcgaccgtggccgaggcgggcgaaggctccgaagtcgacgctacctccgctgaaactggggatggcgcggaaggcgccgaggcgggcgagggtcccgaggtcgaagcggcctccgtctcgcagaccgacgccgcgagcggtaccgctgcgaacgacatcgtcctgcagctttcgccgaactattgggtgtacgacgccgatgtcgacgttgcaggtcgcggcgccgtcatggtggaccacgtgatcgcgatcgtcggatgggacaacacgtactcgcgctggaacttcgccacgccgcttatcgacgatgccaccgggcagaaccgcgcttacgatcccgagatcgccgaggtcgcaaccggtaaagacggcgaggactacatcgttcccacgatggacggcgcgtgggttgtcaagaactcgtggggcaccgaggacagcgactctggcgtgacggtgcttcagggcgacaagggcatcttctacctttcgtactgcgagaagacgatcgcccagccgacgacgatggtccccgacgaggcggcaagcgacgatctcccatacgacgagacgtaccagtacgacgcctcgaccgcttcgaccatcttcgacgaccccttcgagatactgggcgcgaacgtgttcaccgccacgggatcccagtcgatcgatgcgctcggcgtatgggtgacggagtacgatacgacgctcgacatcagggtgtacacgaacctctccgacgcgagcgatccggaaagcgggacgctcgtgagctcccagcgggagcacgtgccttctttcgggtggtacaccgtcgatctcgatcagccggcctcggtttccgaaggcgagacgttcagcgtggtggcgtcatggaatgccccgccgtcggacggcggctcttcgtacagctacgttcccatggagaatacggatagcaacacggtgtacctccatggcggcgaaagctttttcggtacgatcgtctcccttgatcaaggggatgtcgaatgggtcgattgccagctgcttgccgatcctgtgcacagcaacgtgtgcatcaaggcgttcgctacggaaagcgaagaagagcccggggatcccgagaaccccgaaggccccgagggccccgccggcgcggtgccgctcgatccgaacgatgcgaacggcgaagcggggtcgccgacgagcccgcttgcgaaagcgggcgatccgctgccgcttgcgactgcgggcgcttcggccgtgctggcactggttgcgctcgtcgttgcgcggaggcgtgcgctgcgctagccgaaggttcgcgtccaaaactcggtcgggtacggcgcgcgcccctttcccttgttcggctctgctcgcttgcggggcgaagcggctcttccaaggcgaagggaggcgcagcccgagtctcgaaacccgactgccgctcgtcaacggatcgtcaagcctgttgcatattcgttgcagccgatttgctacattgaggccctatgcaatctggcactgtatccgatcgaaaggcgaagtatgacgatgcgaacgaaatgggcgggcgcagcgggtcgcacgctgctcgcggggttgctcgcggtaacgcttttgcccgcagctgctgtggcgaacccccaagaaagcacttcgggcgacggggtggcacacgaagcggcggtgcggcttttcgacgagatcgcggcgaacgccatcgcatacaacgaagagcacacgatcgttaccgacgacggcttcaagctgtacgccggctcgtcttcggcggagcagcagggtatccagacgctttccgtccttccggagaaatacacggctccctatacctcgatcaaagatcagggaaagacgggttcgtgctggtcgttcgcatcgatcgccgcgctcgagtcggcgcgtctggtgcagcagggcatcgcgtctgcgggtggtaacgaggtcgactggtcggaagcccacctggtgttcggcacgttcaacggcgagcgcgagggcaacacgctcgacggcgacgagctggaaacgtcgggcaacgaccatcgggtagccccagattacgaagagccgtacggctacgataccgctgggagctcgtattcggccgccgcaacgctcgcggcgggtcgcgggctgtcgaacgagtcggacgtgcccttccttacccctgccacggcgggcgagcttgagggctgcgctttagccatggccgattcggcggtgcgaagctacggcctttcgcgcgttcgcctcgaccgctgcgaggtgcatcccgagatcgcgccgatcgaggtcgccgacggaaatatcgtcggccgcgatttcgacgaagtctcctcggtcgcggccatggagaaaaccaagcaggcggtctacgacaacggtgcggtatcgatgctgtactacgccgatgtgaaccccatagatggtccgtaccaccatcagcccgtagccgctccgactgcggatggggcggctggcggcacggaaggggccgaccaaggcgaagcttccgaagcgctaaagcaagccgccgaagaagaggcgggcgaagcggacgtcgagccccttgcggccgaggcttccgttgcgaacgaggctgatcctgcagacgataccgttatccagatctctccgaactactgggtctacgatgccgacaccgacgtagaggatcgcggcatcgcggtgccgaaccatgcggtcacgatcgtcgggtgggacaacacgtactcgcgctggaacttcgccacgccgcttctcgacgatgacaccgggcagaaccgcgattacgactccgatatcgcgacggttcaggaaggcgcagacggcgaggactacatcgttcccataatggacggcgcgtggatcgtcaagaactcgtggggcgctcgcgtcaagagcgaaagcagcgacaaaacggccatcatgggcgacgagggcatcttctacttctcgtactgcgagaagacgatcgcccagccgacgtcgctgatccccgacgaggcggaaagcgacgatctcccatacgatgagacgtaccagtacgatgccatagaggccagctatatcccggggatggggcacgatgtcatgggggcgaacgtgttcaccgctacgcgctcccagacgatcgatgcggtgggcgcttgggtgaagggcttcgatacgacgctcgacatcaaggtgtacacgaacctctccgacgcgagcgatcccgaaagcggaacgcttgtaagctcgcagcaggaaagcgtgccttctttggggtggtacaccttcgatctcgaccagcccgcgcaggttgccgcaggcgagaagttcagcgtcgtgatgaagtggttcggcacgtcgccggaggattcgaccgaggggaattatctttccgtggagatggtcggtcccgatgacgaggtgtacgggtctttcggcgagagcttcgtgggggcggtcggcgtagggggccagggcaaggcccaatgggtcgatctgcaggaggtaaacccggatcgtttcggcaacgtgtgcatcaaggcgttcgccaccgaaagcgacgaagagcccgagaaccccgccgatgcctcgtcgttcgacccgcgtgagaagggtctgacgacgccggtgcgcaaccaagagcaatccgacctgtgcgggccgttctcttccatggcatcgcttgagacctcgctcgtctacgacggagccgcctcggacgagctcgtcgcgcaaggcttatcacccttccatgcggcgtacttcgcctatgtgggcgacgaggagcgcgaatcgttcggcgttgcacccatggcccctgtgacctccccgtacggtgcgggtacgacgcccttccgcatagcgggcagcctggcgcacggcaagggcgcggtagtggcagaagcgggcgtgaccgattgggcgaatcccgaaatcagcgagtcgctgcgctatgcgagtgacgttcggctgacggatgcgtcgttcttcgccgccggcgccgcgtcgtattgggagcaaccgagcgaggctgatctcaagcgtgcagtgaaggaggaaattgccgaaaacgggccggtgacggctgcgttctgctcggataggggtatgaattacaattgggatcattccagctggtatgccgataggtcccagggtgcgttcaccgagaaccattacattgccattgtcggctgggacgacgatttttcgcgctacaactttaacgcctacatgcgacccgatgacgacggtgcgtggctgatcaagaactcgtggggaaccgacgatggcgaggcggggtactactggatttcgtacgaagacgactcccttgagatcgaggcggcgctttcaggcaagccggccgattcgaacgagaagatatatgattacgatgcggcgggatggctgaactcgctttcagtggacggctcgacgacgggctatgcggccaacgcgttcacgagcgagcgcgacgagacgcttcgctccgtgcagctgtgcgcaacggggcgcaacaccgcctatacgatcgaagtctatcgcggcgtggccgatgcgggcgatccgacctcgggcgagctcgcgtcgacgacttcgggaacggtcaagaatccgggctatgcgacggtcgatcttgccgaacccgttgccctacgtgcgggcgatgcgttctcggttgtggtgaagctcgagaatacgagcttcgcgtatcccattgccgtcgaagcgtatacgcccgatcccgaatcggtgggaaggcagcccgatttcatgggattcggcgccgagggcgagcctgaggtgagcctggtgtcggccgacggattgtcgtgggagaaccctgcgggctacgggcgcgacctggcgagagcgggcgatcgcagttcggtgaccaacgtgtgcgtgaaggcgatcaccgtgccgcgcgatgcgagcggcgatgtcgtgttcggcgatggcggaggctcgaaggcaccggcaccgctcgccaaggcgggcgatccgctgtcgctcgcgactgcaagcgcgttggctgcgctgggactggtcgctctggccgttgcgcgcaggcgcataaacggcaagcgcttctgacagggggttgattgccgccttttgcggaaggcggcaatcatcttggacgattaccttactgcttatatacgcaaaacgctgctttcggtgatatcatgctcctattgttgtctcatccccgtcgaagtgggcggggcaaggattgggggtttgatgcggggtatggataagtttttcaagatatcggagcgcggcagctcggtttccaccgagatcatcggcggtttgacgacgtttcttgccatgtcgtacatcattgcggtgaacccggcgatgatggcggaggcgggaatcccgttcaacgctgcactgaccgcaacgtgcttcggtgcagctgtcatgacggtcgcgatgggcctgttcgccaaccggcccatcgcgctcgcttcaggcatggggatcaatgcgatcgtagcctattcgctgtgcctcgggctcggggtcgattggcgtgtggccatgggcgttattttcctcgaaggcgtgctcattctcgtcttggtgctatgcggcctccggcaagcggtgatggatgcgattcccgtttcccttcgccgcgcgatcggcatcggcattggtctgttcatcgcgttcatcggtctgaaaggcggcggcatcgtggccgatgacgcgtcgacgctcatcgtcctcggggacttgacgagccctgcggcaatcgtcgcggttgtctccatcatcgtggctgtcgtgtttacggcgctcaagttcaaggcgggcctgctcatttccatcgtggtcgccaccatcgtgggcattcccctgggtgtgacgccgccgatcacggacttcacgttcgtccctgatttctctgcgtttgcggcgccgttccagacgacgccgaacggcatgatgggcatcatcgaagtgttcatgcagcccatcttgctgctgttcgtgttcagtctgctcatgagcgacttcttcgacacgatgggcacggttgtggccgtgggcagccgcgcgaacttcgtcgacaagaagggcgacgtcgaagatatcaagccgatcctcacggtcgactcggctgccgctgccgtcggtggtttcgtgggcgcgagctccatcacctcgttcgtggaatcggtttccggtgcggcggcgggtgcgcgtaccggcctgtcgaacatcgtcatcggcgttgcctttgccgtgtgcgcgtttcttgctcccgtcatcggcatggtgagcggttcggcgacgtgcggcgcgctcgtcgttgtgggttacctcatgatgaccgagatcggcgagatcgattggtcggatatctcttcggcgtttcccgccttcgtcacgatcatcggcatcccgttcacgtactcgatagccaacggcatcggcttcgggttcatttcgtactgcattatcaaaatcgttcagggcaaggcgaaggatgtgaagcccctcatgtgggttgcatcgcttgccttcctcgcggcgttcattttcgcgtagtctgctcggacggctttctttcgtgtaaaagcccggccgcacgcggtcgggcttttctgtcggctgccgtaatgccttgcgatcctttgccgaataggttgcaggcagacgctcggctgccgccgccataggttctcgtgtgcgcgggtttgcccggacgatcggtatctcgaaatatcgattagtgatacacttatggttaacctccgtttgcgattgcatcgtcagatgcccatgcggcgcttctctgaggttatgttgctatgatcgggccccgcgaaaagcgagcatggcgactaacgaaatgcaaggcacgtgggcgaaaggcgaagaatggccgaaaactcaactaccggcacccggcggcggtggagcacgtatgtaatcgacagccatcatcggcttgtttaccttgatcaagacatgctggaggccatgccgtcggcgaagcttggcgatcgctgctacgaggtcgttcggggcgaagagatgccgtgctccgattgtccctggggagaggggatcgaggagcggcttggccgcagcgtccttttcaaccatcgcatgcgttgctggttcgaagctacttgcgttgatgtcgagtggccgggtcatgggccgtgcatgctcgttgcgagcaggagcatcgacggatcgagcaagaaccttttcctcgagctcgatgacaattcggtctatgacgagctgatcgaagtcgatttgaagcaggcgacctaccgcgtcttgtaccatgaatcgggaaagtatctcatgccggatatggctgggacgttcgaccgatcggtgttcgaatcgaccctctcgatgatccatgaagatgatcgggagcgatatcgctccttatggagtcgcgagagcctcgagcgcgtgttcgagcgaggcgaaaagatcgccggcgaagaatttcgcatgcgtttgacgagcggtgcgtggaattgggtctcgtacaccatcgtcccgcttgttgacggacgctattccgattgcgcatcgatcatgtgcttcatcaccgacgtgcagaaacgcaaggaacgcggggccgctcggctcgaaagcaacgcaggcgccgcgcttgattgcgagcgcgatgccgtgaccggcttgtggggcgctcggccttttctcgacagggttgagggtatgctctcgaaaaccgatagcgcgcgggcgttcgaggtggcttatatcgatatcgagcacttcaaagtgctcaacgattggtacggtcgggaggtgggcgatcgtatgttgcgggtgctcgccgaacggctgtcgacgttttgcgagcggtatggcggtctcgtcggctatttcgggtctgacgacttcgtcgctttgctgcccgcaggcgcctcgcgcgaaggcgatcttgaagccgcgatcggaaccattgcgcccgatcatgagatgcaggtaagctttttccccgccataggcgtatgcatgatcgacgatcccgccgtgccggtaagcgccctttgcgatcgggctatgattgccatgaacacggtcaagggaacctacgcgcgcaggattgcctggtacgatcgaagcatgggcctcgagctcgagcaagaacccaaaatgcttgccgaaatacagcgggctctcgatgcgcgcgaattcgttctctatgcgcagccgcaatgcaatatcagaacgggcaggatcgtcgggttcgagatcttggttcgctggaaccatcctgaaaaaggactggttgctcccggcgaattcgttccttttctcgagaaaaccggtttcatcgtataccttgaccgctacgtgtgggatgcgacggcgcatgcgctggccgactggatcgagcgcgggctgcatccggttcccgcctcggtcaacgtgtcgcgcgccgatgtgcgcgcgatagacatcgtggatgagttcgagagaatagtggaaaagcacggcatcgacagaagccttctggagatcgaaatcaccgaaagcgcctacgctgaagacgaaagcgtatcccgcctggtgaacgatcttcagctcaggggcttcacggtgcttatggatgatttcggatcggggtactcttcgctcaacatgctcaagaacataggcgttgacacgcttaagatcgatatgggcttgctgcgaagcgatttcgacgacgataatcgcagcgagggcattctcgaggcggtagccggcatggctcggttgatggacatgcccgtgatagccgagggcgttgaaaccgaagagcaggtcgaattcctgcgacgcataggatgcgattacgtgcagggctattacttctaccggccgatgccccaagacgatttcgaaaagcttctttcgaacgaagacctcatcgaccgtcgtggcatgatctctcgcgttgtggatgacatcgacctggccgatttggtgcaggacgggggagtggcgagccgctccattctcgagaacctgctcggcggcatggcggtttatggcgtgtacgacgatcatttcgagcttttgcaggtaaacaacggatactatcaagtgacgggatgcaaccccaccgatctgggcgaacgccaaacatggatataccgtatgctgcatcccgacgatctgccgaaggtcctagcgatgttcgatcgtgccgagaaccatcccatagcaggcgccgaagctacgttcaggagatatcggctttcgggagagctcggctggtttcacctcaaggcgtactttctcaagcgcgaaggcggcaggcgcatcttctatgcgggcatttccgacgtgacggaacagaagcgccaagaagaagctctgctgtcgtctcgagcggtgctcgacagcgtattgaacgtggcgacgacgaaagggaagattgattccctggtcgaggagtaccgcagcatcgcctcccatctgtttgcgcaatcggtgccgtgcggtttgatcggcggctattgcgaagagggcttccctctcttctacgcaaaccaccatttggtttccatgcttggctatgaatcgttcgacgagttcgtcgatgctatcgacgggttggtcgccaacaccatccatcctgatgatttggcgcaggtgatggaggatatcggtccgacctactacgagggcctgtcctacgagacgcgctaccgtatgccgcgcaaggacggttcgtgggtttggacgctggatcgaggccgcgtacttcgagccgaagacggacggcttgccattgcgagcgtttgctgggaaatctccgaagacccctgcggtgccgccgatctctctgccttcgatgcctcgggagagtgcggcggttgcggaaggctttcaaactgacgattggatggtcgcttgcctcatgcgggcgcttcgggtgatcccgcctcgattctgtcgatgagctcctggcgtccctctgtgatctccatcttcgcgtagatatgccgaacgtgggtttgggcggtgcttttggcgatgaacagctcgtcgcagatatagggaatgctgcgccccttgacgagcagcgcgagcacttcggtttcgcggggagagagccgataggcttccgcgacggattcgagattgggggattcggccgcgttgtcttcggggcaatcccgttcgaaaaattcgcctcccatttccttggtctcgttggcgaactgcgcgccgtcggacatctgccacaccatggcaacaagcaggaagagcgaaacgatgctcagagttgccacataatcgaatccaggttgacgtatcgcgactaacagccaagaggcgatctctcctgcgccgatgcccgccaagagcgtgagaaacccctgcgagaacacccgcggatagggaaggcggtacttctgcgcgacgttgcccatgacgatccagaaaaacaccatgaagctcccgaaccccgcaaacgcgattgccatgcagacaatcgagagctcggcggtcgagaatggcagcagcagaaaggcggtggcgacgaggatggtagcgggcctgtatgcgacgacggggttctcccggtggattcgcttgaccatgtaagccgtcagaatgatttcgacgagcaaaaacgccgccacgttgatgatcccgggcacgatcgacgagacccatgtcgattccgtttcggggagcacgtggccagcgaggacgaacagcatgccgtatagggcgattgcggcagaaagctttcttccgaaagggtgcaggatcgtgtgtttatcgggcgcgcttgtcggggtgtggggcgttgcggagcacgcggggaaagcattctcctcgtcggacgccttgcgtgcgctttctccaagcgccagccagcatgtcgccgatgcaatcggaaggcaggagccgacaagcagggcgaacggctgcggcattgtgacgatcgcaaggtagagaatgcatccgctgatcgctcctgcggcggacgcgacgacgcgcttcctgagcctgattgcggaaaacggggaggcccatccaaggcagaggccgacaacgccgagcgcaaccagcgcggcggcaaagacgtcgatgatgtcgccctcggcgaaccgatgcaacatgacgccgagaaacgatgcggctccggtagcggggggaacggcagaagctcctttgctgccgaatgccgagtggcgggtcgacgcgatcagcgctgctgcgaacagtgccgcactgaaggcgaccgctgcgatgcgccacgaaaggccctgcgcaatgagagtcggcgccgatgagaacaccggcgatacggcaagcagcaacagccagcagaccgcagcggcagtgcctgccatcatgcgcatatcgcagctttccttcagattgtcccaccatgtggcgatcatcagcacacctcccgctggttcatggtcgcacagcgggttttttcggtcaatcgttgctttttaccgatacgttttcctgcgaatacgcactttgcaccgatagcggacgacggggcggggctgcatactcggcgcgtggatgtaagcacgtgattggagggaaccatgaaaaagcacgcaatgaatttgagcagaaggaattttctcggcctgggtgtcgtatcggtggcagcagcggcgggtgctgggcttgcgggttgcgcgccgcaggaatcgcaggcgacggccgacgcgaaatcggggggcaagacctatacttgggaggaggaccccgaggcgatcgagagcatagacggcacggaaacagcggacgtcgtcgttgtcggcgcaggcatggcggggctttcggcagcgtgttctgcggcagaaaagggcgcgaaagtgctcgttctcgaaaagacgggaatcgcaaacttccgcggcatcgactacggggctatcggcggtgcgcttcagaaggaggcgggaatcgatctgacggcacgcaaagaggacgtgctgcaggaagtgcttcgctggggtggacatcggggagactaccgtgtggtgaaggcgtgggtcgaccattcggccgaagcactcgactgggctgcgggtatgttatccgatcacggcatcgcgatcgcaccgatgcccgaagagatgcaggtaattcccgacgcttggtacgagcactttgccactgatgcgttccaaatcgtcccgaccgacgagcttatcgccgaaggcagtgaagcgggctacgagcctccgttcgccatcggctgggcgaaggccttcacggcgtacgccgacgagctcggtgtggaaattcggttcaacgtcgaggcggagcgacttgttcgcgaagacggcggccctgtgaccggcgtcatatacaaagatgggtcgaagcatatccaaatcgatgcgaaaagcgtggtgcttgcagcaggtggctacggggctgattccgagatgatggatgcgttcattcccaaccacgaggaggatatttacaacataacaacgcctgcgcacaataccggcgatggcattcgcatgggagcgtgggcgggggcttcgatcgatcccgcgccgcattgcccgatgtatttcgatgagggcgtcgaagggctcgagcatatgccgtccataccgttgacgcgccagccttggctttatctcaacgatttcggtgagcgtttctgcaatgaagatatgccctacgcttacgtgtgccgcgcacacaacgcgcagccacggcatatgaaatgggttatctgggatgcgaagtgggaagtcgatggccctgctatgggcatggtcgtatgcaaggatttccgatcgcctctgcataatcccgaagagattcggcaattcatcgaggaaggccagattctttcggccgatacgatcgacgagctgcttgcgaagatggggggcatcgatcgggaaacggcaaaggctacgatcgaacactacaacgagctgtgtgcggcgggcgtcgataccgatttcgggaagcgcgcgcaatgcttgagctccatcaccgagccgccgttttacgccgtgcattcgggaacgacgctgctgatcacccttgggggacttgagatcaacgaagagcagcaggtacttgatggcgaaaaagagccgatcgagggtttgtgggctgcgggcaattgctcgggcagcttcttcttcgacgactatccgattaccatatcgggcgtgagccacggccgtgcctgcacgggcggtcgtcgagccgggcagttcgctgccgagcgggccgtgggagcgtagcgtgctcgacgacttcgcgggagcgcgtccgtcggccaatcgacgggcgtgctcccgcaatgcttcgaacgcaacggacccgccgaggaatggcgggcccgttcaggggggatgtgaggaaagaggctgttgggctagcctacgcttggcctccaagcactttgccgacggtatagcccatgaggcagttgcgggtgtgggagaggcagttcaggttgtgcgggtaggtgttgtagaacatgccgcccgaggtgaggccgatggcgaagaggccgtcgatcggctggcgttccttgtcgagcacgcggcactcggtatcgacgagcaggccgcctgcggtgcacaggccgtcggcgtgctctttggtggcgtagaacggcggcgtgtcgatggtcatcatcatctcgccggggaaattgaaatcctcgtccttgcccgcggcggccatttcgttccagcggttgatcgatgcgacgaagtcgtcaacgggcacctccatcagttcggcaagctcttcgagcgtgtcggctttcagtgcgttttcgcttgtggctgcggctacccagacttctttggggccgtagcacgaagagctcggcgtccagatcttatcgatcttgttggcgatgtccccatcgacgatgtagtaatcgtaggttccgggctgcgcctggatggcgagtgcaaggtgaccgtaaggctcgtattcgggtgtaaagcgcttgccgagcttgttgacgcgcagatacggcatgagctgctcggggtcgagcatgatcgcctgcgggaactcgtcttcggcggcgccgacggcaaggcccatctggtggccgtcgcctgtgtttccgaaagcgccggtgagccaggcgcccggcacgccgcgcggacggcagcgttccttgagcatctgctggttgaattcgtagccgccagttgcgagcacgacgcccttggcgcaattgtactgttcgaatccttcatcgcttttcacgatgacgccggtcaccttgcccgtgtcatcggtaacgagttggcatgcggggcagctgtaacggatctcgacgccagcctcttgcaggatgcctgcgaggatgcccgcaagatcgccaggggcatagggaaggttgaacgaagtgttccacgagcgggagagcgacgtagtatcccattggtcgcggaaatcggggaaatcgcccgccgcgaacgtcaacggataatcatcgaggttctggttgtcgaaatggctgatgtaccagtcaacggcttctccgttcgtttcgagccaatggcggtacagctccatttcgccctggaacgcgcagtcgaccatggcatcgcccatccaggcatcgaggtcgtaggtcatgccccagtgctcgttgagcttcgagttcgtgccgccgatggtggccgagttgtagttgccgaccgtctgcttttcgacggcgacggttttgagcccttgttcggcgcacgagagcgctgcggcgtcgcccgcgggtccgagcccgcatacgacaacgtcaacgtcgtgcgtggccacgatgtcgctttcggaaatgggctcggcgacaaaggcgatcttgccttcgcccgcagctccaacctctacttcttcgacgacgggccaaacggctttcgaggggtcggtcgtctgcatggctccagcggtttgcgttcccgagccgtttgcggtcgagcctgcttccgcacctgccgtgcttgccgatccgctcggcgagcatccgacgatacccgccatggcggcaaggccggctgttgccgctgcgcctgtcagaaacgagcggcggctgagaccgcttttcgcctcttctgtttcggatgcgtttctggtttcggtgattcgtttcatcgtttccctccaggatgtcgatggtcttgcgctcgattcacgttcgagcatggctgcagtgtggccgcaggacggaaaaagcgcatctgacgaaacggtagatatttgttaattgcctgatcaaagccttatatttgcgagacttatttccttgctcggtttttgcggtatgattgccgaacatttcgagttggggtaaggaggcggcgatgggccaatcgctttcggaaacgaagcaagcgaaaagggctgaggcggcatcgggttgcgagcctcgcagcattcagcgccgccggtctttcgtcgtcgtcatcggttcggcatttctccggtcgtggggattcctctgcttcttgagccccgttatgtttccgcccgatgcagcgctcgacgcgagcatcggaatcgagataggatttttcgtttcgcaggcatcggttgttgcgttcgccctctgcgtgatggctctgtcgcgccgccgccgcttggtagttcgccgttcggcgttcttcgttgccgcggttgccatttccctttcggcggtgggcatcgcgtgggcggttcgtgcgaacgcgatgggggtcgttattgcctgtggcattgtcgacggggtatgcgtgacgctgctcggagttgcctggggtgcgcggtactcgttgggtccgaagcgcatacggcctctggttgtgctttcgtttctcgtcgcctatttgctttacttggtcgttcctcatcttcccggccccgtgccgatcgcgtgcgtgtgccttttgcctgtggcttcatgggcgctgtggcgaaacgatgccacgatacggcacgaggttgcatcggaggtgtttcccgttcgggcatctgataaagggcccggttcgctcggcgagctcgcggcgggttcgtgggaggcctccgtgcttccttggagatccctttccgtgttgctcattgcaacgtttatcggcaatctgataacgtcggttctgcttggccggggatacgcgggcgtcgacagcctgtttttcgggggcatcgtcgtgtgcgcgtgcattgcaaccatggcgctcgtccccctgacttcgggccgcacaacgctttcggtcggcagcgtgtaccgcattacggtaacgttcaccgccatcgggcttgttgccatcatggtgttcggcgttgcgggcgttgcggtgggtggggcgctggtgcagggttcggcgtttttcctgcaggtgctcgtgtttctcgtggttacgcaaagcacgcaggaaagcggcctgtcgccgttgctttcgttcagcatcgggcaggcggtgatctcaggcgtggtgtttctcggaaacgtgctgggaaagcagattggcgatctgttcggatcgggagcgttcgtgctcgacgttttgtgcggggccagtgtgctcgtgttgtttttcatgctggtggcgcgagcgagcgcgtattcggatggggaaatgtcgcaacggggtgcgttggccgataacgaggtggagacccgcgtttcgccgcagggggaagcggcctctcgggttgaggcggctttgcagcctgcgacatcagaggagctcatggttgggaagatcgcctcgttcgccgaagcgcatgggctaacgcatcgcgaaaccgaggtgttcggatacctcgcccgcggccgaagcttgccctatattgccggcgagttgttcgtgacgacggggaccgtcaaaacccacacgacccatatttaccaaaaactcggcgttaattcgaagcaggatctgctcgacatgttcgactcatggggaagtcaggcgtaagggctgcgccaatcctggtttggcggtgggggcgagccccgggtgcacacttttcctcgttgtgttgcgctcgacgtcgcactgcagtgattttgggaatatcgtatgtatattgacctgggaaaacgtcgctgattagcaagcggcggcgcggctgtgggggtcgagcggtccttaaacgcaacacatcgttgatttttgtgcagttcggccgtttcttcttgcacgtggcgagggattgtatcgactggacttgcgcgattgcggatacagcgaccaggggcggctcgttccacccacttgcgctatcatggggttatcgagtgatcggagacctatgagtgcattgtttgaagagctggcaatcaacgggatgcgtgcgaagaaccgtttcgtacgagcggctacctacgagggccttgcgactgacgatgggcatcttacttccgagctcatggcgattcacgaggagctcgcagagggcggcgtcggcacgatcatcgcaggctacgcatacgtaacggccgacgagcagcctaaccccaacatgctcggaatctacgatgactcgtttatctccgaatatcgcgagctggtcgatatcgtgcacgagagcggcgctgcattcgtttcgcagatcgtgtacggcggctcggcgagcaggctcgatccgccgagcaagcgcattttgggaccctctgccatcgcgaacccgaagacgggaatcgtgcccgccgaagcgactaagcgcgacatcgagatgctggtttcggcgttcgccgctgcagccgggcgtgcgagggcggcgggtttcgacggcgtcgagctacatgcggcgcacggctacctgttgagccagtttctgaatccgctcctcaataagcgtgtcgacgagtacggcggttcggttgaaaatcgcgcacgcatcattacggagtccgtgaccgcgattcacaacgaggttggagctgactatccgctgttggtgaagctgaacagctccgatggcgtcgagggcgggctgaccgagcgggatagcatcgaggcggcgcgcctgcttgccgaaagcggagtcgatgcgatcgaagtgagcggcgcatggcgggcatgcgagccgaaggtttatcgcgacaaaccgtattttgccgattacgccaagcagcttgtgcgcgaggtcggcgttcccgtggtgctcaccggcggcaaccgtagcattgacgtcatggagcaccttgctgccgaggacggcatagcggcgtttggcctgtgccgcccccttatctgcgagcccgatctcgtaaaccgctggcgcgacgatccttcgtatcaggctcggtgcacgtcctgcaaccagtgcagctcgacggcgggccatcgctgcattctgccttcgcgctagaaaaggacctgcattcacagagggctcgcattcggcgcgactcttctcttcgcgcttggctttcatggcaaagaaacggcaaacgcccgacgttagcccagcaaaatgcccgttgctgcatacggcatgcctgatcatgagtttttggggtatgatacgcacgttaacgggatgccgaggtcgtgcgcttcgcggaatcgaggatgcgcgtccgccattttttgcgcgaaggagaatccatgcagtacatccattgcttgaacaacatttcgaagtacggaaccgatctgctgcccgatacctacgaactcaccgaagagttcgacaagtcgacgggcgtgttggtccgaagcgccgcgatgcacgacatggaattccctgagagccttctggccatcgcccgcgcaggcgctggtgtgaacaacattccgctcgaccgctgcgccgaagagggcatcgtggtcttcaacactcccggcgccaacgccaacgccgtaaaggagattgtgatctgcggccttctgctcggcagccgcggcatcgtcgagggcatcgagtggtgccgcgaaaacgccgacgacgagaacatcgccaaagcagcggaaaaagccaagaaagcgttcgcgggccgcgagatactcggcaagaagctcggcgtcatcggcctcggtgcgattggcgcgcaggttgccaatacggcaatcgatttgggcatggatgtgtacggctacgatccctatgtttcggtgggcgctgcctggcgcatgtcgagcgaggtgcatcacgtgaccaatctcgacgatatcttccgcgagtgcgactacatcaccatccatgttccggccatggaagggaccatcggaatggtggatgcgcatgcctgcgaactcatgaaggacggcgcggtgttcttaaacttctcgcgcgatacgctcgtcgataatgcggctatggccgcagcgctcgagtcgggcaaggtgcacgcctacatcaccgattttgcggtgccggaggttatgaggatgaacggtgccatcgtgctgcctcatcttggcgcttcgacggccgaggccgaggacaactgcgcgatcatggccgtgcgcgagcttgtcaactacatcgagaacggcaacatcgtgaattccgtcaactatcccgcttgcgatatgggcgcctgccccgcaggaggccatcgcgttgcggttatgcataagaacgttcctaacacggtgagccagatcaccaatgcgttcggcgaagagggcgtcaacatcgaaaacctgacgaacaagtctcgcggtgatttcgcctacacgctgcttgatatcgatcaggaagcccccgaggcggcaatcgcaaagctcaacagcattgacgatattcgccgcgttcgcgtggtatgctaatcggcaaacctaccaatgttacccatctgcagcctgtgcgatcgcccgggctgcagattcgatgctctcgcgggcaatgcccgtgtagcttatgacgaattttcggggaagagtggttccgggaggcagattcggcaggttttccgcatcttgatagaacgacgagagcggtgcgagagctacccctcgtgcttgggcggctcgcgcaatctcctgctcgcttgcagccgatttgatccctaagatgaagtggagccccgaatcttcggcctcgatgctcatgcgatcggcaagggaggtcgctttgaaggcggcgatgagatcgttgcgcaccgagcggtagtgggtgcgcatgcggttcacgtgccgttcgtaatcgccgttttcgatgaatcgcgcaagcgccaactgatcgattgcgctgaccgtgcaggagtagaatccgagctcttgctcgaagcgggtggcaaggtgttctggcaggaccatgtatccgatgcggaaggccggcccgaggcttttcgtgaaggtgttcgtgtagataacgcgctcgcttgcatcgatggtctgcagcgcgggaatcggcctgcctgcaaggcgaaactcgcaatcgtaatcgtcttcgatgacgaatcggccattttcttccgatgcccagccgagaagctcgtagcgacggctgatcgcggtgacgaggccggtggggtattggtgcgagggcatgatgtggagcacatcggctccgcaacgtctgagcttttcgacttcgatgccgccctcgtccatcggcacatgggaaagcgccacgttgttcgcgcggtagatttgggtaaggcgcgcatagccggggtcctcgacggcgtagcgcatggttctgcccaacagctgtacgatcaggttgtagagggtttgggcccccgagccgacgacgatctggtcgggggcgacctgcatgcccctgaaaccgctcaggtggttggcgagcgcgcggcgcaatcggagcgacccggctgccgaggtttcgcagagcagcgttcgctccgactcttccgcaagtgcttcgcgtacggttttcgcccatgtgccgtaagggaaaaggcccgttgccacggagcttccggtgaagtcggcaacaagggggctcgacgcagattcctcggcttgcgcgtgtgctttctgctgccgcgctgcccgggagcttggcgttgctgcgttcttgacgagggggtttgcgaaataccctttccgctcgatagcgtatacatagccttcggctgcaagctgggtgtaagctccttcgacggtgatcaggctcacgcccagatggcgcgcgagggatcgcttcgagggaagcttctcgtgggcggcgatggtgcccgtttctatgtcgtttcgaatgcacttgtaaaggtattcgtacaggctgtccgttcctcggtgttcgagcgcgtaggtgagcaaagccgttccttcttgtttggcgttattgtcgtctggttataatctgaccatattcaaaaaaccatttttgataataccactaaggtcatatacgcgatagccttgctcgtagtcgagaacggattcgagggaaaggcggctggtcatgcaggaggaatcgaagaacggcgaagatagaagcgagctcaaccgtgcgcttgcccagatgctcaagggaggcgtgatcatggatgtgacgacgcccgaacaggcgcgcatcgccgaggaggcgggtgcctgcgcggttatggcgctcgaacgcataccagctgatattcgggctgcgggcggcgtttcgcgcatgagcgatccttcgatgatcaagggcatccaagccgccgtgagcattcccgttatggcaaaatgccgcatcggccatttcgtggaagcgcagatactgcaggcgatcgagatagattacatcgacgagagcgaagtgctttcacctgccgacgatacctaccatatcgataagaccgccttcgccgtccctttcgtgtgcggtgcgcgcgacctcggcgaagccttgcgccgcatagcggagggcgcctcgatgattcgtaccaagggcgagcccggcactggcgatgtcgtgcaggcggtgcgtcacatgcgtatgatgaacgcccagatcggcaaagtggcatcgcttcgcgaagatgaattgttcgaggaggcgaaacagctgcaggtgccctgcgacctggttcgcttcgtgcacgagaacggaaagcttcccgtggtgaatttcgcagcaggcggtgttgccacgcctgcagatgcggcgcttatgatgcagcttggcgctgagggcgtgttcgtggggtcgggcatcttcaagtcgggcgatcctgccaagcgcgcccaggcaatcgtgaaggccgtcgcgaactacggcgatgccgagatgatcgtatcgctgtccgaaaatctcggcgcggctatggtgggcatcaacgagcaggagatcgatctgctgatggccgagcgcgggaaataggatgccgtgatgtggatagcgcatgcaagcggcaaagcgctgcctggggatgggcaaacagtcggcgttcttgccgtgcaaggggcattcgtcgaacacgaacgccgtctcgcgcagttgggttgcgcgtgcatcgaattgaggaaggcagccgatctcgaaaagccgttcgaccgcctgatcttgcctgggggagagagcacggtgcagatcaagctgttgcatgaactggggatgtgcgggccgcttcgcgaacgcatcgaaggcggcatgccggtgctcggaacctgtgcggggctcattctgcttgccgatcgggctgaaggtgcagcggatggcgggcgaagcgggctcgccacgatgcccgtaacggttcgacgcaacgcctatggcaggcagctggggagtttccatgcgaacgccgcctttgcgggggaggaaaacgtgcccatgacgttcattcgagcgccgtttgttaccgaggtgggcaaggaggttgaggtgctcgcccgggttggcggcgacatagtggctgttcggtacagaaatcagctcggggtggcgttccatcctgagctcgatgatgacgatcgggttctgaaattatttcttgccgatggggccctgctacatgaataaaggccgccatctgcgatgtcgaggctgtagatgcgcgcgttccggtaagcctggcggtgcttctttccgaaaagctgcggtagagttttgattcatgccaatttttcctgcatgcaaaagggatgtgtttatgctgaatgcatggaaaccatcgtttgttcgtacggccaaggccgcaaaggccttggccggcggtgtgaagtagcgtacgaggcccaagtgaaacccggcgtacgttcaatcgtcgggtagagaaaaagcaacatcttgtcggcgcccgcggcttcgtttaaggaatacgaagccgcgggcgtgtttttgcgtggtcgcacagtcatcttttttcaaaaacttctattactcgcatgaaagctgcgcccagtctatgccgaatcaggcattttgcatgtaaatctaataaaaacgtaaaacaaatgtgatacacaaaaaatggcctagaatctttgggagcagtgcgtttggttttgctccagaaggcatttccaaaaagatacaacctgataaagaatcaataacctgcaaaaacgcagcaacctcacaatgccgtcgaatgttgatgccctttcttgacaaacctgcctggaggctgattagatgtgaaaatctactcgggggttcatgaatattctgtgcagagggtctattcgaaagtgggcttgcctttgagcaagacaccagaagcgagaagggggtacgcttatggcagcgagaagctttgtctttgcggatccacgtaagtgcatcggctgcaaaacgtgcatggtggcgtgcattcggtctcatgagggaagcgagatgacgggacctcgtcttcggcttgttactacgataaaggtatccgcgccgattggctgccaccattgtctagacgcgccctgcgtgaagtcttgcccgacgggatgcttgcattcagacggctcgcgtgtcgccattcgcgaagagcgctgcatcggctgtcagaactgcgttcttgcctgtccgttcggagctatctccattggatccaggccgaagctcgagtcgttcggggggcttgcgtttaattcggggcagaccccggttgttgtcaaatgcgatctttgcgctggacgcagcgcgggaccggcttgcgtagaggcatgcccgaccgatggcctgtttcttgccgacgataagttctttgcggcagaggaggcggctaagcgcgacagagccgcaaaatccgttgaatcattcatggaatcgttttcggatgtaacactatagtgaggggttgccttatggaaaagcacatgactgtatgtccgtactgcggtgccggatgcaaaatgaatcttgttgtcgaaaatggtttgatcgtagatgccgagcccctgcacggagtgaccaacgaggggaatctgtgcttgaagggattgagcggctacgatttcgtgaacgatacgaaaatactgacgccgcgcttgctccatcctatgatcaggcgccgtaaaggggcagaactcgaacgcgtaacctgggacgaagcactcgattttactgcgcagcgtttgtcggagatcaaggagaaatacggacccgattcgatcatgctcaccggatcatcccgcgggccgggcaacgaagccaatttcgtcatgcagaagttcacaagggcgtgcataggcaccaacaacatcgacaactgtgcgagaacgtgccatgccccttccgtcatcggtctgatggatacgattggaagcggtgccatgagcgtaagcattccaggattcgaagaagcttcctgcatcatgttgtttggatacaatcctgccgccagtcaccctatcgtagcgcggagaatcgtcaaggcgaaggaaaagggagcccgcgtcatcgtttgcgatccgcgcgttatcgaaacggcccgcatcgccgatatccacattcaaatgaagaatggttccaatctcgcgcttttgaacgcgatggcgttcacgattatcgaggaagggctgtccgatagggcgttcatcgatgcccatacaagcgggtatgaagcctggctcgaggtaatccagcagtatccgcccgaggcagtggaggatgtcgttggcgtgaaggccgaaataattcgtgaagctgcaaggatgtacgccactgcggagtcgtcgattatcggttggggcatgggcgtcacccaacagcggcaaggcgtgcacacagtccacgccatagcttctcttgcctgcattgcgggcaagataggcaagcctcattgcggcgtggctcccgtgcgcggccagaacaacgtgcagggcagctgcgatatgggaatgcttccgaacttgtatcccggctaccagaaggtggaagacgcgaaggtgcgggcgaagttcgcaaaggcatggggtcttcctgctgagaagctgtccaacaaagagggattcaagcttaccgatcttccccatggcgtgcgggacggcagcatcaaggcgttttacaacttcggagaagatccgctgcagaccgaaccggattccgccgatatggaaaagacgctgaagaatcttgaattctttatcagtcaagatattttcatgactcagacgacggcgcttgccgacgtcgtgctgcccgccacttcatggggcgagcacgaaggggttttcactgcctcggatcgatcgttccagcgctttacggccgccgtgccgcctaagggagaatgcaagcatgattgggagatattccaagagatttcgacgcggatgggctatccgatgcgctatcggaatacgaaggagatttgggatgaggttcgggagctctgcccccagttctacggggcaacctacgagcggatggagggcctcggatatgcgcagtggccgattcccgatatcgagggagaaggtacgccggacctgtatctcgacggcagcttcaacaccttcgacgggcgtgcgttgctgctctctcaccattggagcgctccgacggaagagccagatgagggatatcccctcgtgctctgcacagtgcgcgaggtgggacattattcgtgcaggtcgatgactggcaactgcaaggctttggcgcagcttgccgatgagccgggctacgtacatatcaatccgatcgacgcacgcaagcgcgacattcgagatgaagaactcgtttgggtgtattcgagacggggcaaggttatcacgcgagccgcgctcgatgagcgtgtcaatcctggagccgtatacatgacctatcaatggtgggtcgggaaatgcaacgatctcacgatgcatgttaccgatcctctgtcgggtacgcctgaagacaaatacagctcgtgtgacgtcgcttccatcggtgatcaggtttgggctgagcagcatatggaaacgctatacagcgaattgaaggcccgtcttgctgccgaggcggcgcgccaagacggacccacgctcaagtacggcgagcggcaatagtcacttgacgacgtgcttggaggacggatgtgaatcgctatatagtcataaaccccgatgcgtgcattggttgcaagacgtgcgaggcagcctgcattgcggctcatgagaaagcgggtctccaaagtgctgcccggttgacggttgtcgaaacgaagggtgtgtccgccgtttctctctgtcatcagtgcgcaagcgccccctgccttgccatatgtccaactggcgttattacacgcgaaaacggcattgtccgcgtggatgagcagcggtgcgtcggatgcaaaatgtgctcgattgcctgtccgtacggggcggtgattccgtcgggcacttcggttgcgggtgttgcgggcgtgtgtttcagaacaccgagatatccaggctcggcaagtcctttgctcaagtgggaggcaggcgttgctgcctgcgcggtgaaatgcgatctgtgtgcaggtgcgtcggaaagccctcgctgcgtcgatgcgtgtccgacaggtgcgcttgttctgatcggccaagaaacccttgatgccgatttgcgcgaaagaaggctccgcgcggcagaggaaatggaggctgtatcggttgaaagctcgaagggttggaggtcgcaatgggtctgacattgttggtgggcgcaggcggcatatcagttgtgggcgctttggtttcccttctgctgtatcgtcaggaaagcgcagtcaagtttctttcgtgtagctgcggcgtcgtatcctcggtcctggccctcgggttcggcttaatatcgatgttagggccaacgcaggtgctgagggccgtaagccccttcgggtttgcggacttctcgatttcctgcaaccctctttccggcttgctgattgcggtgatttcggtgctggcgatagccgcgtggatatacgggttttcgtatttcgacgagtatcggggtcgcggtatcggcaaaatcgggttttatatgaacctgttcgtgatatccatgattttcgtagtagcagtcgacaatgcattctggttcctggtttttttcgagctcatgtcgctaacatcgtatttcctcgttgtattcgatcgttccgaacaggcgcaacggggcggattcgtgtatttcgtcatggctcatatcggttttctcatgatcatggtggcgtttcttatgatggcgaacgctgcaggaggaagcttcgagttctccgacttccggcaggttgcgatggcgcctgcggcagcctcgatcgttttcatgctcgcgtttctcggcttcggcatcaaagctggcatggttccctttcattcgtggcttcccctggcgcatcccgaggctccgtcgaacgtgtcggcgcttatgtcgggcggtatggtgaaaatcggcatcttcggtattgtgaaagtttgctttgacttgttgggggcttcgggttgccagctttggtggggcttcgtcgtcatgatgctcggcgttgtatcggcggtgttcggcatcgcgtatgcggtggcagaacgggatatcaaaagaacgcttgcgtactgcacggttgaaaacatcggaatcgttctgatcggcgttggggtggcaatcttcggtatggctcttgaacagccgatagtcgcgactttgggacttttgggcggattgtaccatctcgtcaatcacgcaatgttcaaaggtgcgcttttccttggcgcgggttcggctattttccgggttcatacccgatcgcttgatgcgatggggggtcttgccaggagaatgccctggacggctgcggtattcctcatcgcttcggtcgccatctgcgcgatacctccgttgaacgggttcgcttcagaatggatcacctaccagtcgctgctcgacgtctctcttggagctgctccccttataaagacggcggcggttctagcggcggcttcgcttgcgatttcgggagctttggccatcgtatgcttcgttaaagcgtacggagttgctttctcgggtgcgccgcgatccgaaaaagcgcgggaagcccgtgaggtgcctgttgctatggtggtgggaagcgtgctgctggcagcgatatgcatctgcctcggcgtgggtgcggcatggatcgcgcctgcgatcggtcgaatcgcggcttctgttctcggcatggcggcctcgaccgccccggtggccttgggttcggaactggtgaacccgcttgcgggaacaggggtgtcttttatcctgatcgccgtgctgctgatcgttctcgcattgctgctcgtagggctgcgtgctgtcgtgcggcgcagggcgggcgccggtctgcgaaaggagccgtgggactgtggctatcttcccgaacgggagatgctcgctgcctcaacgagcttttcctctgcagcgggcatgttctttgcagcgttgtaccgggctcgggatctggtttctgcgcaaaaggtgaaagtcgagttcttgtacgaaaggctggtggggggaatcggaaaagccgagccgctctccgatcggtatttggtcgatggggtgatcggaatcgtcagcaagctaagccaagcgactcggaaagtcgaaggaggcgattatcgcgtctacgtctcctacgtcgttgtcgcgctcgtcttcttcctgatactgaccgttgcgatcggataagcgagggagccatgaatgagatagtgctagcgattctgcaacctgtagcccttctgcttgccgcaccgcttttttcgggcgtcagcagagttcttcgggcgaagatgcatacgcggaagggtccgagcatcttccaagactactatgacatactgaagctgttcaaaagggaggatgttcgcacgatcgattccggtgcgccgttcaggatcatgccggtgctctacctggcaacggtcttgctgcttgccatggggatacctatggttactcgattctgtccgataccggcgctcggcgatttcatcgtggtcgtgtacatgctcgcgttgccccggttcttttttgcgctgtcttcgatcgatagctcgggatcgtatcccggtgtcggcggtgttagggaactgcttgccagcgcgcttatcgagccgtcgatgattatcgcactgttcgctgtcgcgattgcgacggggtgttcgaacatcggcgatatgggaggcgctctttcgtctctctcgttcacttcgcccatcgcaatggtcgttgcggcgttcgccttctgcgtagcatgctatatggagcttggaaagcttccctacgatgttgccgaagccgagcaggagcttcaggaaggccccttggccgaatactccgggccttcgttggcctttctcaaactggggatgtcgcttaagcagatcatcgtgatcagtatgctccttgccatcttcttcccattcggaagcgctgtcgatatgactcctgcttcactggctttagggctgctggtgttcttcgtgaaaatgtcggtcgtattcaccgtgtgcgctctcattgagaatacggtcgtacgcgtgcggttcaaattgctatcccagcatacgtggatggtggtgggatgctctgtcttgtcgcttgcgttcctcgttatgggcatataggtggaaggagtgatgagcatgctgtcagggatcgaggttgcgttctttccgctcttggctatattggtgcccttcgcggggatgctgctgattcttgcgctgccgcgtggtgcggctcgctggatctgcgccgtcgctgcgggcgtctcgcttcttgcgtgcttagctgccgcggggctttttgcgcaggggggcatgcagggaagcacgcttccgtgcctgtggttcggttcggtggtcgtgttcggctttaccgtcgatgccatgagcacgctgctcgctgcggcgttcgtgggcatcgggtttttggtgaccgtgtactcgttcgcttacctgaataagggaaatcgcgaacaccctgacgagcacaagaagcggttctacgcggtgttcatcgctttcatcggtgcgatggccggcttggttttcagttccacgatactcggacagctcgtcttcttcgagattaccggtgcatgttcgtggtctctcatcggctattacaacaacgccacgtcgagaaaatcagcgatgaaagcgctcatcatcacgcacatagcatcgctcgggctctattgcggcgccgccgttttgttcttggagaccggttcctttgagcttcaggcgatcgctcagcttggagaaggcgcaaaagcgttcgtccttatcgcgattctcgtcgcggcatggggcaagtcggctcagttgccgttttacatgtggcttccgtcggctatggaggcgcccacccccgtttcggcgtatctccatggtgcatcgatggtgaaggttggcgtgtacattttcgctcgggcgctcttgtgtgcggggtccgtaccgatcgaggtcggctgggttgtcgttgtgggagcaatcgtgaccatggtgttcagtttccttatgtacttgccgcagaaggacatcaaacgtctgctggcgtattcgacgatcgcgcagctttcgtatatgtttcttggtttcggctttgcgatcttcgggtcgcagctggccatgcagggcggtattgcccatattttcaaccatgcgtttgccaagaccctgttcttcctcgtcgcaggcgccctgagctacacgatgggcacgcggcttcttacgaagttccagggtctttcgtcaaagatgccgcttttggcgatcgcgttcgcgtttggcgctttggcgattggcggacttcctccgttcggcccgtttttcagcaagttcatgatattggccggtgggtttgaggtctcgtcgcaaagcgtgttgttgttggtgatcgtgatcgtcgcgatcatcgagtccctctgctcgttcgcatggtttttgaagtggatgggttcggtagtttcgggcgcgccgtctgaaacggtcgaagacgcccatccgcttccgaagcctatggcggttgtgtttgtcgtgctcatggttatgacggtctgctctgggttcattgcagtgacttggttgagttagggtgatggtgtcatgtctgcatttgcttgggtaaacgccctcggcggtctgcttatcgtcacgtcgacgatggtggttcttgcccgatcggttagaaagtcggcgattctttacgcgctgcaatcgcttgttctcgtactgcttctcgtctcgcttgtatttgcgacggattcagaagttctgttcatgtggtctgcatcggctttcatcaccaaggtcgtgctcgttccgagcatgttgctgtttctgcagaggaagctcggtgccgattcgcaagatctcggtgagcgcctctccccgttcaagagcatcacactgatcgccttagaggtgctgatctgtttcgcggcgatacagggcatcgatctctacactgctgcagaggtgaagcccgcgctcgccatttcgcttgcccacttcttcatcggtcttacatgcatcgtctcgcagcgcaacattgtgaagcagatattcggatactgtctgatggaaaacggctcgcatgtaacattggctcttcttgctccacaggcgccggagcttgtggaaatcggcattgccactgatgccatcttcgccgtcctcatcatggttctcatggttttgaggatatacaagatcacgaagacgctcgacgctcgtgatcttatggaattgagggggtagaacatggatatttcaagtctgctgctcgttgcgatggcgacgccgcttgtcgcctgtttgctgatagcggttcttcccataaggctgccccggatcgcgttcgaagcggtacacatcgtatcgatcgggataacgtttctgtcgagcctgttcgttgtcgccttcgtgttcgggggcggcggctcggtggaggttatcgatgtctggtttcaagtcgatgcgctgagcgccgtcttccttggactggtgagcacggttgccctgttgacgggcgtttgctcggtatcctatatccgtttcgatgccagggaggggcgctttgatgcctcgcaaaccaagcggttctatgctttcttcagcttgtttttgtttaccatgcagttggttgttacatcgaacaacgtgatcatgatgtgggtggctatcgaggcgacgacgctttcgaccgtatttttggtgggttcgtacaatacgaaaatctcgctcgaggccgcatggaagtatcttatcgtttgcacggctggtgttgcgttcggcctgtacggcaccttgctcgtgtatgcgaatgcggcagacatcatggccgacccgcatcaagcggtattctggacatccctcgttccatatgctgcccaattcgactcggcgctcatcaggatagcgtttgtgtttgcagcgatcgggtttggcacgaaagcggggctgtttcccatgcatacctggatgccagatgcctactcgcaggcgccgagtccgctatcggggctgatgtccggtgcccttgctaagtgcgcaatgctggttctcattaggttttacgttctagcggtgcaagcggtcggacccgaattcccccagaccgtcatgctcatattgggagctgcttcgatactgttcagcgcatttgccgttttttcgcaaaatgacctcaagcgcaagttggcttacagctcgtgcgaaaacatcggcatcgtcgcgctttgcttagggttcggtggcccgctcggcattgccgccgcacttcttcactgcatattccacggtcttgcgaaggctctcatgttctgcctctcgggcaacgtgatcatgaaattcaaaaccagcaatcttgaaaagatcatcggcgtggtgcaggttgcccctgttacggcggttttgctgggtgcaggtctttttgccctttcggggttccccccgttcgcgctgtttctcagcgaggtgcttacggtgctgtctggcatctacgcgggttacctttggcttgtcattccgatttgcttggcgctgacggttgtgattgcggccttcagtctcgtgtttcttcggtcggtgctgggcaaagctcctgattccgccaaaaagaaagacgtgggcgctacgatgctcgttcccgagatggtgctcatggctttgctgttatggttcggcgtggctttgccggctccggttataagcggggtgggatcggcgacggcgatagtcatgcaggaagatgcgtcgcacctgtacgagataccgcttttcggcgacgtgctgcatacggccgataagacaatgtttccaagcgaatagggaggttcttgtgaccaaacgaagtggaaatagggaaaaacgccgtggttcgacgcacgtcgaagcaatccggaggcagttccatggggcactcatgggcgagacgtggcaatccgacgaacaggtaaccatgacggttagggcggattcggtgcccgatgtcgtgcgattcctttattatcgaagaggtgggtggatttcggttgtggtcggcaacgatgagcgtccgatcaacggcaacttcgccctgtactacgtgctctctatggaggaatccgatccttgcatatgcgtggtccgcagcgaggtgtctcccgaggagggaacgtttccgtcggttgctgcccgagttccagcgtgcgtctggggggaacgcgaaattcgcgacatgttcgggctgacgcccattggcattcccgatgggcgtaggcttgttcttcccgacgactggcccgagggactctatccgctgcgcaaggactccatggattaccgtcatcgtcccgaacttgccgccgatcttgagaattacgagtttctgaacagagctgaaccgggaacaactacggttattcccatggggcctctgcatatcacttccgacgagcccggccatttcaggttgtttgtcgaaggggagtacatcgtcgatgccgactaccggatgttctacgttcatcgcggtatggaaaaagtcgccgaggcgcgtatgacttacgatacggttccttttcttgccgatcgcatctgcggtatctgcggttgcgcccattcggtcgcatatgcccaatcggttgagaattcgcaggagatactggttcccgaacgcgctcaggtgatccgctctattctgcttgaggtcgaaaggttgcattcgcatctgctcaatctggggctcgtatgccacttctgcggcttcgatacggggttcatgcacttcttccgagtaagggaaaaagcgatgaaccttgcagaaatgcttacgggtgcgcgaaagacctacgggatcaacctgatcggcggtgtaagaagggacatcctttccgatcagagcatgaaaacgattcggatgctcggtgagcttcggcaggaaaccgatcatctggtagaagcgttgctgtcgacagcgaatttcgaaagccgcacggcgggcatcggcatcttggatcccgaggtcgcgcgcgactacagcccggtaggtccgacaatcaggggaagcggcttttcccgcgacacgcgcttcgatcacccgtttgccggataccggtatacggataagaaggcttgcgtgcacgacggatgcgatgtaaagagtcggacgctcgtgagggtagaggaattcttcgacagtctcgatatgattcaggcatggctcgagaatacgccgacgggtccgattttgaacgaatcgtggaagtacgagccgcatcggtttgcggtgggcttcaccgaagcgccccgcggcgaagatcttcactggtccatgacgggcaacaaccaaaaatgctatcgttggcgggcgaaagcctcaacgtacagcaattggccggtgcttcgctccatgctgcgcgggaacacgatcgcggatgccgccgttatcgtggggagcatagatccgtgctactcgtgtaccgatcgggtgaccgtcgtcgacatcggcaagaagtcggaaacggtgataacgaagcaggagctcgaggactattgtcgcgatcgcacccgatcccctctgatgggccgttggtaaggagccggcgatgctgaaaacactgaaaggcattctgaagacaggcgatgcgaccgtcaaatacccttttgcgcccattgagcaggctccggatgttcgcggcaaacccgagcatgatgcgttgcgttgcgttgcttgcgcggcatgcgctacggcgtgtccgccgaatgcgattcaaatggaattgaacagcggagcgggtactgttacgtggacgatcaattacggcaggtgcattttctgcggtcggtgcgaagaggtctgcccggttgatgcgatcaggctcgggacggaattcgagctggcggtcatgctcaaggcggatttagtggattcgtgcacgtatcggcttcaggaatgctcatgctgtggcgagtactttgcgccgcgcaaagaagtcgagtacgtagcaagcgtgctcgacaagatggggggcgtcggtgcttcgggcgattctgtcggcctttgtttggcatgcaagcaaagaaatgatgctctcgcatacgaaaaccgcgcaaggggaaggaggtagttatggttgaacgaggtataccgactcagctgcaggcgcagctcgagccgaagaagctgagcgaagaaattacgaaggcaaaggcgacgttgctgaagaacatcaagcgatccgtgtacgtctatcgggtagattgcggcggctgcaatgcctgcgagatcgagatattctcttcgatcactccggtgttcgatgtggagcgcttcggaatcaaggtggttcccacaccgcgccacgccgacgtccttgtgtataccggggcggtgacgagggctatgaggcttccggccatacgcgcctacgaggctgcccccgatcccaagatcatcgtctcgtacggagcctgcggatgcacgggcggcatattccacgacaattactgcgtctggggtggaaccgacaagctgtttcccgtggatgtctacattccgggctgtccgcccacgccggctcagacggtgtatggtttcgccatggcgctcggcatgctcgaccaaaagcagcatgcggtacacgaggtcgaagccgaaggagaatacgtgcccttgaaatacgaggacattccgcatggcctgcgggttcagcttgagcgcgaagcacgtcgtctatcggggtaccgacagggcggcgatatgtgcgatttgttcctcgaggtgcttcaaaacggcgaagtcgatgctttgagggaggtcgatctgcttattgcggcgcagaaggattcccgaaagaaggaggttctgaccagcctcaaagatttgctcgtgtcgagaaccgttgggagctgatatgggcggccgggttgtcatgtaccagttgacggcaaagctggtcgacagcgaaatcgatattccgccggatgcccaggacattatgtactacacgttatcggtaggacatcatacgggcgttatggactgcttttccgcaaagctgtcctgcccgatcgagacgttcgaatcggtgcttgaaaacatagcagacgatcgggctcgttcgaagctcggcggcatattgcgattcggcgagatacagattgacaagagccatctgcccgtgctcaaaccagctatcaagcgtacgttgcgcgagctttttacgaggaaggacacgaatccctattcggccgaactggtttggatgagcgatttcattcagctgctcgatgcgaccgagaaggagacggctatgtaccttatgggcaggaggatcgatgactgataaggtgcttctgacggtggggagcgtattgcggggagatgatgctgcgggaccgatgcttgcgaagctgatgtcggagcaccccgaagcaggatgggcggtcgttgacggggggcagacgcccgaagacgaactgcaggcaatcaggcgcatagcgcctaaaaccgtcgttgtggtcgatgctgcccatatgggcttggacacaggggcgattcgccggctgaaggcggaggacgtcgcgcggagcttcctcattaccacccacgctcttcccctgacgttccttctcggtcagttgggtgaattggccgaagtggtgatatttctgggtatccaaccagccgacacgacgttcttcaatcctctgacgcctgcggtgaaggaatcggttgaagagctatgcggacggcttgtcagcggagccgatttgatggagtacccggcgttcgaaaagaccaagcagtagctgaatcagagaaaggaacggctatgaaaatcgatgcccaaatgccaacgagaattattttcggagcaggtcggttagacgagctggcgtcgctcgatcttccggggtcgcatgcgcttatctgcacgggtaaaagtgcgcgacccgagcggaaggaattgcttgcacgcgtgattaagctgctcgatggcgcagagatcgatgcgaccgcatatgaggggatgacgccgaatccgaccgacgaagaggttcgggaagcatgtgagcttgcaaaggaagccgggtgtgatttcgtcataggtttgggagggggcagcagcatcgacggtgccaaggccgttgccatgatgatgagacaaggcggaagactgtgggattacgcctatacgggtacgggtggaagaaaagaaataacctgcgcggcgcccgtggtcgccatctccacgacggcgggaaccggtaccgaaaccgatccgtacagtgttatcacgaaggtggaaacgggcgaaaagcttgattttgccgccgatgcgctgtgccccgttctatcgatcatcgacccagaactcatggtgtcgctgcccaaggaccaaaccatctatcagggagtcgatgcgctgttccatgcggcggaatgcgcgatcaccaacaggggggagaataggctggtggacgtgtttgcgcaggagtcgatttccaacgtgctcgcttggctcccggtcgtcgtcgaggatccgggcaatatcgaaggccgggcgatgatcgcctacgctgcggatatctgcagcggttatacgcagacgcttatcaataccacttcacaccacattatcgcccagacgatcggcggcatgtttccttcggttgcccacggggcaagcttgatcatgattgccgaggaatactacagacgcatagccgagttcgtgcctgacgaactcgatcgagtcggggcgtatcttggcgtcgatccttgcggcggccgtcgcgggcagtcgttcgctgatggcttggggagtctgttcgactgccttggcgtgcgcgggatcgctatgagtgaatacggcataacgcgggaggatctgcccgtcatagccgatgcagcggtcaatcgcaccggtattgccgatgtcgatttgtatacgcttaccgaagatgatgttctcggcattctgcaaagatcgtaccgatagcgaaccttgcatggaaagcaatagctacagcaagccgtacagcgcctggtatgttgcggaagccaattgggtgccggtcaccgaagtcgttgccgtcgaggaatccgtcggtatctactacgacggccagcttatcgaggaagcgtcgtgtactcccgaagatctgaaggaccttgcaatcgggtatctgtacacttcgggaacgatcgagtgcctcgatgatgtctcctgcgtcgaagacggtatcggcgaagcaggtttggaggtgagggtcttgtcttcaaaccagaggcggatcgctgaaagcccccgcctgcctttgcgtgcagacgcgactgccggcgaattcagggtatcgccagaagccgttcatcgggcaagtgccgctctcctcggcgcccagcgcatgcatcgcggtacaggcgccacccatgctgctgcgttcgccgacctcgccggcggctatcgctgtattcgggaggatatcggtaggcataacgccgttgataagctcatcggcgccttgctgggcagttcgaccgctccagcgagcgggttcgtccatctttcaagcaggtgcgctttggatcttgtaaagaagtgcgccgtattcggcatacggctcatttcgacagtgtcggctccgacatcggcggttatcgaattcgccgataggcaggggattgctctctgcgccttttcccgaaatgggcatttcaccgtttatacccatccggagaatctttcaagatagccgatccctcgcactcgacgtccggggggggtccgctcgctgcgatgcaggcctccgatgcgaatctcaaatccatcggaggcctgtgcgcgttgcgagtgcgatcagctgatgttcataatggaatgctcggttacgtagtcgtttgccttcaggcggagggctgactggcgagcctcttgcattctgccgtttcgctcgaagtcaagtctgatcatggcttcgagccccggcgaagcggcagctttgaagtattcgtcgagatcgttgtcgtcgacatcgaggtcgaaatgccgagctacggcatcgagagcgaattgtctgacgagttgttcgcgcacctggttatcgaagtgagccatgagctgctgctcggttaccccctgctgtcgcagaaaatcctctttcgtcatatcttgctgggcgagctggtcttcgaacgactgtaggatatcagcggtaacggcatcgaacacggcaggtgggatttcgccctcgaagcgcttgacgagctcgttggcgcttagcaggtttttgtagtggcggtattcgatcgacttgcgttcgaagatcgcctcgcgggcgctttcccgcaggccttgcaccccgtcgacgtcgggcatgttttcgcggatccacgcgtcatcgaggttgggcacaatcagcttctggacctttttggcggttaccgtcgaggtatagtgctcgatttccggctcgtagttctcatcgagggtgaagcccgggtatttgtactcgatggttttcgtttcgccgacgttcattttcatgacctgttcgtcgaaatcgggaggcatcatatccgcccccgtggtgtaggtgcggctctccgaacaaagctgatcacagcgaacgccgtctttgaacgtttcgatttccaactcgacgagatcgcccttcctgatttccgcatggcttgcgtcttcttcgaggtaggcgtggctttgagcgagggaatcgagatagcgttctatgtcttggtcggtgacttcgagcggaggcactgttatatggacgggatcgtacgaggaaagcgagaacgaaggcttgagcgtgcagagtgcctcgaaggcgaagtcggcgttgcgggcgagggggccatgcgcggtgaaggagggctttccgactatctccacgttgcttccttcggcggcgaaggggaacgaataccccatgatcgatgcccgtaggcgttcgctaactgcggttgcgccgagtttcgccgcggatgcttcttcgaggctctggccttcttcaggcgtgatgttgttctggtaggccaaggctatggtgaactggtcgatgagcgtgtttacgtcatcggccttgatggtgatgctgagggtggcatgatcgtcatcgacacgatcataaacagattgcagctccatataactactccttcgcatagggtcggcttttgcgggcagacctcatgacccgtatcgcacaagcgacaggtcttgatacggaatgtttagccatcggatgctgtttgtatcggaaaagatacaagccaagtataccacagcaagcggggtttcggatggcaaatacggcttcaaacaggctagatcatatttttcatcagcggtttatcgaagctgacgatttcgtgactgtaaagatggttgcgggcgacgagcaagcaatcgatgtagtcgagcatgctggatccgaacaggcgcgtggcgtagcggacgatgtcttcttcgctgacgcgaatgtcgtcgaggaggttgagcattgcttcgcttacgagcgagcgcggaacgctgtatacgtctctgagggtaaccgccacacgtgcgaatatctctggatacgaataagcgtgccccccggcgataaggcttgccgcctgctttgcttttcttttgtcgtcattgagcaggtagcgtagaataacgctctcgtcgatgattgtaatcattttttggccaatgacgagatccatgcttcgcgctccacttcgcgcgattgcggtttcgagtacaggttcaggaaaccgaaggcctcgtcgcctcccttcttttcgaagcttttgatctgaaaaggaaacttttgatcgagcgtgcattgcttgaggaagattctgaccgcctcggaaaggcttgttcccatcgattcgaataaaacttccgattcggccttcaaatcggcgtcgatcctgacgtgcaagatggtttctttcataaaaccccctgtaaaatgtaaaaaacgtaacacaattgtactacatgcgatccttaatttcatttgcaaaaacgaggttttcgcgcagtgcatcactggcgctcttgataggcaaaatacctgatcataatgagaaacaattatatgagcgcttcactatgatttccgactcaaatccttgacaattcactgagcgccaatgtaataatggtcgggcatcggatgcactggttatcagaattatccaaattcaatttgaaattggggggaggtgtaatccgaatgactttaggacttggtttgctctacgtcggttgcgttctgtttatgaatggtgtgggaacgcttcagaagtgggatccaaaggccatggcggtcatgaatttctttaccggcggtttgctcgtggtgatcaacactatcaatatcgcatgtaccgtcgttgcggttggcgcagacggcattggcgccgacttctacggaattgcgaccaatatgctgtttggttttacctatctgttcgtgggatgtacgaatctgtttaaactcgacggaaggccgcttgcctggtactgcctgttcgttgcggtaaacacgttgccgtgtgcgtacctttcgtttgtaacggctgatccgatcttcggggttatatggcttatctggggaactttgtggttggcttactggttcgccggcgccgaaatgaagataacccttgggccgaagttcatcggttggtacaccgtcgttgtaggaattatcacatgctgggttcctggatacatgcttctggcagattggtggaagttcctgtactaagcgcatgagggtagggttttttgggagggcggagtccgttctcccatacaaagcgaaggcgggtgaaatcacttgccgaaacgtacggcgaggcgtgtcgcgtcgccgagattggaggaaagaattatgggcagtatcggaagtatgaataaacctgagaatggcttcctggcagcactgattcagttccctgtgccgatcgtcaactcccgggctgatatcgacaaacagattgaaagcatcattcgcacgctccatgccaccaaggccggttatccgggcctcgagctcatcgtgttccccgagtacagcacccagggcctcaacacggccaaatggctgactgaagaattcctgtgcgacgttcccggacccgagaccgaggcgttcggccaagcttgcaaggaagagggcatctacggcgtcttctccattatggagcgcaaccccgatcccgacaagaatccgtacaacaccgctatcatcatcgatccgaatggcgagatctgcttgaagtatcgcaagctgttcccgtggaatccgatcgagccttggtatcctggcgatctcggtatgcctgtgtgtgacggacctgctggttctaagctcgccgtgtgcatttgccatgacggtatgatccccgagcttgcccgtgaagctgcctataagggttgcaacgtgtacatccgcatctccggttacagcacgcaggtttgcgagcagtggatcctcaccaaccgctccaatgcgtggcataaccttatgtacacgctggctgtcaaccttgctggttacgataacgtcttctactacttcggcgaaggccagatcacgaactacgacggtaccgttctcgttcagggccatcgcaatccttgggagatcgtcaccggcgaaatcttcccctgccaggccgaccaggcacgtcgttcttggggtcttgagaacaacatctacaaccttggccatcgcggctacgtcgccctccccggtggcgaaagcgatgccggccttacctgggtcaaggatcttgcagccggcaagtataagcttccttgggaagacgagatggatatcaaagacggtagcatttacggttatccgacaaccggcggtcgcttcggcaagtaagcggcgtttcgcggcataaagggttttcggcatcgaatcggtgcaagggaaatgcttacgggtggtcgctcgaaccgggcgaccaccctttcttcgtcaaccaggcacgttcggacgagaggcgtttgcgagggataaacgtttcccgatcacgggctccttttgatatcggacgcccctcggcggcaagcgtcttaccatctcagacgttttctgaccgtcgacgcacacgatgaggcacatcaccctattcggccttcacaacggcgtgcgcctccagcgatagggcgtcttatttcacttcgatcgtgggaatgatctcgctgacggcgttttcccagtcgacttgggtttcgaactgcgtgccgttggcctgggcgggctggatgatcttctcggcgggaacggtcccgagggtttgcaggtcgattagctcatcggcaacggattcgtcgagcaggtctgcatgccagccctcaggtgtcgcttcgggcaggttgatatcgaagacgatccatgcgaagttcgtcatccagagttctgcacgttttccgttgccgagttccttgctgaacaccagagccgtatcgggattgtcttctgccgcaggggttgtggagcttgcctcggcgctgctttcgatggcaggggaggaggcatctactatcttcatggttacgaggctcgcttcgggaaagccgtttgcgtaaaccgaagcgcttccatcgtcgccgtagacgatgttcacgcgattgctccagtacgacggcaggtcgaacacgaacagatcggtgcttacgcgatctcgcgcagccggagttgatctctgttcggttttccagtcgatactgcctgtcttttgagcggattcgcttgcttcctgccgtatcagctcggaatgttcggcgtttttcgccgaagcggcctcctgaagggcgaagtaatcgaatccgtgcgaatcgaacggggtggcgtgggaggttggcggtttggtgagcgaaatcgcgaaaacgaggattgcgatgacggcggctgcgatgatgcaggatacgacgactcctcgtacggtgttggcgggcctttggttctctgccatgattatcgactccttcgtgctgtgctcgaggcgtcccaggggcgcttcagataggtaagatagtaagagtatagcgagcgaagagagctgtggcattggatacgggcattcgtttcgcccgtgcaagcaggcggtaaacaagctgttttatgcacccgtatgcccttccggtttcgagcgggcaacaaaacaggacggattgcgtcaaagcggttatgttggtggcaagaaaacatatagctcgttcgaaccagaaggagaacgatcatgaacgtacatgactttaccgtaaaaggatccaagggcgatgccgaagacctctcccaatacgatggaaaagtactgctcatcgtgaatacggcgacgaagtgcggacttacgccgcagtacgagcagctcgaagcgatctacgaaaagtaccgcgatcgcgggttcgaaatcctcgactttccgtcgaatcagttcctcaagcaggctcccggcaccgatgaggagatcagcgatttctgcacgctcaactatggcaccacgtttccccggttttccaaagtcgatgtgaacggcaaagatgccgagcctctgttcgcttggctcaaggaacagctccccgatgagcatgccgatgaggaagcgaaatccttcgctaagaaggttaaggcgctcctgccgttttccaagaagggcgatatcacgtggaacttcggcaaattcctgatcgatcgcgaaggcaatccggttgctcgctacgccccggcctatgcacccgaaaaactcgaagcggatatcgagaagcttctcgactaggacgttctcccgccgggcttcggaatcgagctcttcttgcttcgcgcctgcgcccgcaacgctctgcgatgctgctataatgctctgtcgagttgcattgcgaaggcaacaggtgggcggaggctttgggtggaatcaccggaggcttcctcatcaggggattggaactccggactgcatgttcaacacgctcataatatgctacctttttttgggtggagcgggcgcgggagcgcttaccgtcatgggggcgcttgagtgcgcgaacgcccggtcccgattcggctacgagatctgcgcggcctcttcgccaagccgccgcgtccgcatgcggcagacctttacgctgcccgacgatttcttcgcccggagctggtcgatctgcttcatcgcgcttgcgacgggcatactgtgcctcttcgccgacctgggcaggcccgaccggatcatcaacctgcttgcgacgccgactccctctgccatcaccgtcggctcctatgctttggtatgctcgctcgtctgctcgggggcattcgccctgttggccctgttcgagattccgcgcatcccgcctttggccatcatcgcccttggagttgtttccgtagcgtcgggaattgcgaccatggcctatacgggcgtcctgctgcaaagcatggcgtcaattctgttttggcagacacctctgcttcccgccgtgttcgtactctcatcgctttcctgcggcatcgcgctggtgctgttcgccacctcgttcgtcgaagcgcgctacgcattcgtcaagcccatcgtgttgctttgccgcgtcgacagcgccgccattgcgctcgaggccgtttgcctcgcgggacttttggcttggggcatggccggcgagggaacgaggcttgcagccgagtcccttatcgcaggcgatatgcgttggttgttctgggcgggactcgttgtaggcggactggcggttccgcttgcgctcgagcggttcgtgacccacggcaactaccgcactcagcttctctggatcagctcgttcctccttgcaggcggattcgtattaagatattgcatcgtcggaaccgcctcgtacgatgtgacccaaatgcccgatctcttctttggattagctccccgataaacgaaaggctgtaaccatgggacgacgcaacccccgcatgatgaaggacgcaccctatgacgttcgcgataaggaggccgaggtcagagcggctacctcgtacgttccccgtaaatcgtcgcgaaacggtgcggtcatctttagcatcgctgtattcgtggccacgtgtgcgatcgtgctcggcgcggctttcgttgcgacggggggcattggcgttgaggcgatcatagccatgctgcttattgcagtgctcgtgctttcttcgacccacattgctctcagctgggaaaaggtggtagtacttcgcttcggcaagctgaaccgcgttgtggggcccggtctgtacttcaccattcccatcatcgagcatggcaccatccgcgtcgaccagcgcatcatcgccacacccttctatgcggaaaagactctcgcggccgatctcgtccccgtgaacattgatgccgtgctattctgggtggtgtgggatgcggagaaggcttgcaccgaagtcgaggactactacgccgccgtatcattcctcgcgcagaccgccatgcgtgaggcggtgggccgttcgacggtcgccgaggtggctctgcgccgtgaccagcttgatctggaaatcaaggaagacatcgagaaagaggctgccagctggggcgtcgacatcatatcggtgaaggtgcgcgacattgtcatccccgatgagctacaggaggttatgtcgctcgaggcgcaggcggaccgcgagaagaacgcccgtatggccgtggtcggcgtggagcgcgatctggcggagatgctctccgaggccgccgaggtatacggcgatcccgatgcggcgctgaagctgcgcactatgctcatgcagtacgaaacggtgaagaagtcgagcggtaccgtcgttaccgtaccgagcgctttgagcgacggttttatcggggaggtgggggagaagcagggtgcgcctgcgcgtagtctccgtggataatctttgtgcaagtgaaaggcctgctatcatgcatgccaatcacttcatcgaaagactgtccccatgagtccacttgaatcattcgaaattgactacagcaccggtcttcccgtttggatacaggtaaagaaccgcattgcctatctgatcgggtcgggcgaatacaaagcgggcgatcgcctccctactgtgcgtgcgctggcggtcgatctcgacattagctacaacaccgtgaaccgcgcgtacatggatctcgagcgcgagggctatatcagcacgagaaaagggcgcggcacgttcgttgccgagcgcaacgacattggcgcggcccgcgctaccgacagccccgtcgagcttctgatcgatgacatgatcaacgcgtgctcccacgcgggcctcaatgaagacgatatccttgcgatggtcaaggcgcggctcgcgcatcgcaaggtgtgagccacagccgcctgcgcggcggagtcgtccggagagcgcatgtgttccattctttatttattctcaaattgagatagtttgtcatattgattgtcgcaatagattgcgataaggtgacagcacaaggatttggccaattcttaagaggagtatcagggggatatcctgaaggattgcgcgcgggggagctcgaagaattgggttttcgctggacagtccaacagaagatatcctgacacaatctttgaggaggagaaatgtcaggagcgaacagtccgcacggcggactcactcgtagaagctttctcaaaaccaccgcagttgttgcaggagcggccaccgttgtcgggggtgcgtcttcgctcacggcgttagcggaaacctacagcgctggacaggtcgaagcggaaggcgagcagattttccgcggtgtgtgccgtccgaattgcttcggcttttgccatgtcaacgtccacgttcgcgacggtcgggtgacgaagacttcgcgtgcggagtacaacgagaagtgctacgaccgcatctgccagcgcggcctttcccatgtccacaggatctacgaccctgatcgcgtgcaatatcccatgcgccgcgccgaaggcactgagcgcggtgccggtcagtgggagcgtgtgagctgggacgaggctcttaccgagatcgccgacaaaatcaaagccatccaaagtcagtacggcgagagcgctgtggcgttcctcaccgcttcgggcaaccaagctgctggcatcaccggcgcatacggtcgcctccaggctcttctgaacgccagcagcatcggcccttgcctggacatgggcagctactacggaatgcaggcggtagccggtctctatgtcagccccctgatgggtttgcagatgtgggagggcaacgagcccaccgacgctaagaatgcgaacaccatcgtggtgtggggcgcgaacatcactgatgctcaggtgcagaactggcatctggtcaaagaggccatgcagggcggcaccaagctggtggtcgtcgaccctgttttcacgcagattgcgtctaaggccgacaagtggatccccattcgccccggcagtgacacgctgttgaagtacgctctcatgaacatcgttcttgagaaggaagcgcaggatgtggagtacttgcagcagcatacggttgccccgttcctggttcgcagcgacacgggcatgtttgtgcgccgcagtgataccggcatcgagcccactgcgaccggcgaggtgaaccccacgacgggcgaggagatcatgctcgatccgtacatggtgctggtcggcggcgagctagttgaggtgaccggggtcgtcgcccccgatctcgagggcacctacgagctcgatggtgtgaaatgccgcaccgcctacgaactgctgaaagaagagatcctttcgcattctcccgaggaagtttccaagttgaccgaggtttccgtcgaggatatctacgagcttgccgacatctgcatggatacgccggtgtaccactacgagggatacggtccgcaggcgtacaacaatggtgcgcacaccaccatggccggccttacgctctgtgcccttctgggcaatctgggcaagccaggtgcctcgtacggtgcgttctggggcgtccatatgggcgtcggctccacctacggcacgccagaaggcgctgcgagtacgggcttcacaatccccagtgtcgacttgaaaaacgttgtggagcagggtcagttcggcggcaagaaggccgacataaagatgctgtggatgtattcggcgaatccgttgaacacccatactgacacctgcgcttggaccgacgttatcattcctgcgatggaatacgttgtcgtagccgattcggcgatgaccgactctgcacgctacgccgacatggtactgcccatcgcgcagtggttcgagcttgaggaagtggcgaacgcaggacagtgttcttctctgaactacaacgagaaggccatcgaccccttgtacgaaagcaagcccgacacccagattgtctccgaacttgccgaaaagctggggcttggaaagtacttcacgctgagcaatgcggagattctcgacgaggtgttcaacactcaggtcggcaccgctctcggcatggacatgaagaccctgcgcgagaagaagcaggtgcgcttcattcccggcgatgccgaaaccgatccgcatatcgcttacaaggacggcgcgttcggaaccgcgtcgggtcgcttcgagttttaccgcgagatgcccgtggtgcgtgcggctacgaccaagacgccgactcccgaggagatcgagcgcgaccgcatgccccattggttcccgccgttggaggcgtggccggaaaacgaactgtactcgaagtatccgctggtcctcatgagcgagcgtccgcgctaccgcgtccattcgcagtggttcaacacgccgcttctgcgcgaaatcgaccccgagcccttcgtgaagatcaatcccgcagacgccgaggcgcgcggcatcgtcgacggcagctacgtcgagtgcttcaatgaccgcggcaccgccgtggccaaggctgtgttctccgaggctatccgtcccggcacgctgctttaccccaagggctggcagctcaaccagcacaaatcgggcggctggtcgctcttgagttccaccgagttcgacgtgtttgcggtaaacaacaacttcatggatgtgctttgcgacgttcgcgtatgggaagggagtgacgaataatgacacgtcttggttttgtcatcgataaaaagtcctgcattgcctgccatgcgtgcgcagtagcgtgcaaagtggaaaacaacctgcctgacggcatctggtggaaccgcatcctcaccgagggcggggagaacatggacacgcctgcgggcacgtatcccaacctcaccatggcgaacatcgctgtcgggtgtcagcattgcgacaaccccgcatgtgtgaaggtgtgccccgtgggtgccacctaccaggatcccgatacaggcgctgtgcgtcaggactacgacaagtgcatcggctgccgcatgtgcatgtcagcctgcccctacacgggcgtgcgctcgttcaactgggaagagccgagctacgccatcggccaggctatgggcgacgccgatgtccccgtgcatcagaagcatgtggtcgagaagtgcacgatgtgctggcacaggctggcaaagggcctcgagcccgcttgcgtcgagccttgccccgcccgcgtgcgctacttcggggatttcgacgatccgaactccgaggtgtccaagctcatccgcgagcgtgagtacacgaagctgctcgacgagcgcggcaccaatccgtccgtctactacctcgtttaagcagaaagggagagaaaaatgtctgagaacaaccaggcgacatcgtcgtcatcggctcctgctgccaaattcgggggcaagggcatcaacgtcgccatcgtcatcgcggcgatcgtgaccgtcgcggggctcgtcctctggggagtgcagctttcgggcggcatggttcagaccggcatgcgcaacctcgactcgtgggggctctacatcacctgcttcatgttcctcgtgggtctgtccgccggcggtctcatcatctcgtcggtgccccgcgccttcggcatgaagggcttcggcggcatctcgaaggtcgcggtctggacctcgatctgctgcacggtgctcgccatcggcttcgtggtcgtcgacctcggccagccgttgcgtttgtgggagctgttcgcctactcgaacctcggctcgccgctgatgtgggacatcgcggtgatatcgatctacctgatactctcggtcgtctacctctgggcgacgcttcgcgccgaggccggcaaggtctccgagagggcgctgcgcgtcgtcagcgtggtcgcgctcgtcacggccgtgctcgtgcacagcgtgacggcgtggatcttcgggctgcagcaggcccacgagttctggcacacggcgctcctggccccgtggttcgtgtcctccgcgctggtctgcggcaccgcgctcgtgctgatcgtggtcgtggcgctgcgccgcgccggctacatggagctcgcgcaggagaacgtcgtcaagatggcgaagatgctcggcgcgttcgtcatggtcgacctgtacttcttcggctgcgacctcctgacctccgccttcccgggcggcagcggcgccgaggtcgtggacatgctcgtgtccggcccgctcgccccgttcttctgggtcgagataatcggatgcgcgctcgccgccgcggtctgcttcgtgccgaggctgcgcaccaacccgctgctcgtggtcgcgagcctgctcgccatcgtgggcatcttctgcaagcgcgtccagctcctggtcggcggcttccagatcccgaacctcgacatgccgggcgtcatgacccagtactccgtgaccgactggaccgccggcatggcgggcgcctaccagggcatggtctactggccgaccccgatcgagttcgggatcgcgctcggggtgttcggcctcggcgcgctcatcctgctcctcggcctcaagttcctgcccttgaagcctgcggagaactcgcactagggaaccccgcccggggccgcttcctcccgccgctgctgcgcaggggacggccccgggctctctttaaggattcgttatggtgaagaagaccctcataaccctcgcggcgttcctgctcgtcggcgcctgcacgttcggcgcgggcgcgctcgccgacccctcggtggggctgccgcaggcgatagccgaggactccccgtgccccgcgacctcgtgcgcgtcgggggagtgccacggcttcgtagacgtgcccgaacccgacggcgtccacgagatggagtgccccgaggcggcctgcgcgagcgtggagtgccacgcgtgggacaccctgacggagcgctactacagcccctccgacgccagcctcaacctgtggctgctcgcgcccacggcgctcgtcgtcggcctcgtgctgctcgtgaagaaggtgaggtagatggacgggaagaggctcttcgccgtcgacgccgtcgccctcgccgcctacctcgcggccgcgacccccgcgctgacgggcgtcgccgtgcacgagtggctcgggataggcgtgttcgtcgtgttcttcgtccacgccgtccagcatgccggctggatcgccgacaccgtgcgcacggctctcggctctcccgcgcccgcgcgcgtcgcgaacctcgcgctcgacgcgctcatcctggtggcgttcatggtcgtgaccatgtcggggctgctgatatcgggcgcggtgctgcccgccttcggcctctacgccggaggctactacttctgggatcccctgcatgcgatagcggccaaagcacttttagcgttgcttctcgttcacgtggtcgttcactggaaatggatctacagctttttcaagaagaggggctccgatgctcgcgcgagccgcgccgatgcggaagaggccgatgcggaggaagccgacggtcgggcctaacggggcgttcgctgggctcggaatggagctccgagaaggacggctcgtcgaacaaagtgaattgcctccgggcaataaagcgggttgcatggatttgcggcccgcttttgcttgcccaggtttcggtgcggcggcgatgcgccgtgctccgcgcagaaaacgccggggccgggtgcgggaatctgcggttcgagcgccgagggggaagcgtgcgcccgctctttcccgacgggtcgcccatagcgctggatcggggcgctggcgcgagctacgcgccttctactgggcgcaaggcgggccggaagcccgatgcgaacggcggttccagcgcccgaaccgcaagagcccgcactcaggcggtccttcttgcgcgcggtccgcctcgtgagaaaacccccgagctgggtgcaggtttttgcggttttgcatgcttggattctcgggttcgacgtcagtgtttatcgtgccgcaatgcggcgattccgtgaactggtgcccctatgatcttaccgatactcgcttttacttggggcgggaatcgtggcgctcggggatgctcgcgggaacgcaaaaccgcaaatatctgcacccaggtgcctcttttctgcacgagcgtctggttggcttctttgctggagcccgatatttctttcgcattgggtcatcgggcctcctattgagctaatttgcccaataggcaaatgatacaactggccgctcgcgctctcgcccagatgcatcccccatccgaatgcgctatcataagcgcagcacaacccatgaacgagaagctttctgaacccggtacaattgcagcacggaaggcgcatggcaaacgaacagctcatactcaatcgatacaggccgatcgcgcaggcgggatcgggcgggttcggcacggtccaggttgcctgggacacgcgcatccagcgtcgtgttgccatcaaatgcatccagcttgacgagagccaggcgtttcgggctctgcaggtagaagcgcaggccatttacggaaatccgtacgggggcgatgggtcgtaccgagacggcgatccgtacgaacgcgacaacccccgtgccgtcccggccgtctctctcgaaaacctgcccggcctcgacgaggcgcgtaccgctgcgatgctttccgaccccaacatcgtgggagtctacgatttcgaggttcgcaatgcgacggcgtacctcatcatggaatacgtcgacggaatgacgttgacgaacctgctgcaccagcacggcgacgagctgtcgctcgatgcgatagcggccatcttctcgtcgatcgcccatgcgcttgaagttgcccacgataaccaggtgcttcacctcgatattaagcccgataacgtgctcatcaaccatcaggggcaggtgaaagtgaccgatttcggtcttgccacgctctccgatgcgacggggttcggcacggcgggcggcggcacgatcggctacatgccgctcgaacagatgaggcaggaagcgctcgatgctcgatgcgacgaatgggcgcttgcgagccttacctatgagatgctgacgggcgaaaacccgtttcttgcccccgatctctcgaaggcggaagccgcaatcgaagacgccgagctgctgcttccatcgctttgctacgacggactcgacgcggaggctgacgacgtgctgttctacgcgctcgaccccgatcgcgaggagcgctacgacaacgtcgaggacttctcggaagagatgagccgtttcttcggcaattccgcacgcgggcacaaggagcttgcaatgctcgtcggccaagctgtggaagaaccggaagacgaggaggaggtcgtcgagcgcatcagcctcttcgatcgaatcggcacgggcaggatgcagtcggttctcgtccgcatttgggcggcgcttggcgtggggctgttgagcttcgtgtcgctttccaacatttcggcggcaggcggctgggcgagcccggtgttctggggtctgttcgcgctcttcgtgctggccggggtgctgaagccgcacttgggagcgttgctttcgcttctgtctctttccgttgcgctgctgttccaagaagcgttcgtcgtgggcattctgatgatcgtccttgtatgcgcgtggtggttcttcgtgggtcggttgagcgacgagggatccaatgcggcgctcgctccggttctgttcggctcgttcgggttcaatccggtgtcgccgctcgttgcgggattcttcctttcggtaagggaggcgattgccactgcggcgttcgcgttcgcgctgagcatcgtgcttgccggtttcggctcgaacagccttgcgggttggaatgcgcttgcgttttgggatttcggctcgcttgacgtgcagcacaacatgctcgttctcctacagcaaccgcttacgtggtgcgtgctggcaggctggatgggggcagctgcgattctagcgcttttgtgccggaggcagacgcggctttccgcgggcatcggtgcggcgctcgcctgtgctctcatgatagctgcgctgtgcttgggcgcatggtttgcttcgggcatggtttcttggatgcctgacttgcaactgcttatcccgacgatcggggcaggcgttgtggcggttgtcgcttgcgcgttcggcgttcccattcgcccggatgaatggggagagtgggaagaataggggcgtggcgcggtcggttcgcgcgttgcttttcttagattccgataaggttttggagttcgattttgctatggacgttgagttttgcgtaaagtttccgagagtgtcctcgaacagtgttctcggtgataaacagcgtttcggcgatgtaggctttgcttcttcctttgcatagcagttgcatcacttcggtttcccgtgcagtaaggccgaagctcgctgcaagggcttcgcaacgctcgtcgatgagggcgaagtcttgcggatcatgcacggactcgtcgaggtcggagaagatgcgctgtagcacagggtctcggttctctaaaaacaaggtaattgtcagcgttattatgaatagcaaaacgagtgcgactggaggagtcatcgatgttgcgataacgccgctcgaactgagtacctttccgaggtagttcggaaaggtgtaggagatccagccgcccgcaaagactacaaacgggtgcaggttgctgtggtgcgctatatcggatagaagcagccaaagaaatacaacgacgagatacgatatgctcgttgagcatatgctttggaaagcggcggtatattcgtatgcgctgaaaacgagcatcgtcccaataaggagcaggatgcaacgccatagctgcacgaagctgagaacgcgcttctgcgtcagcgtccaccaaagaatgaaaagcgaaacgcctatttctattgcatggccgataacccctgcatagtcgaaggtgttgtcgaatgacttcggtagccctgtggcgaaggagtatacgagtgagtatattgccacgcagctcatcaccttccaaagcgacccgatgctctttttcgtataacggatctcggctccttggagcgggggagctagggtgagcgagcgcctaaggaaggcggttgagagcagcggaagaagtagtgcgaaagcggatccgatcgcatcgggcagaatgccaagtacggttttggcgagagctccgaagatgcatgcggtaaaaatgcatccaagcgcgttctttaacgagagaccgctgtagaaaacgccccatcgaacatagaaccatccaaggcatgcgcccccaagaaggatggctaggctgctcgcccataagagagaaggcgattgcgcatgcgggctagcccaacagtagagcgttatcaggcatccgagtgcggtaaacgcaatatcggaaagcctatggaaacctactttgctggtctttgcgaccccccagtaaacgaggacgatggcgatcatgagtatcgattgcccgagatacggggaaatccacggatgcaacgcggagccagaaagcggattgttcgtgttgagccacatgatccacgtatgcatggtccatatgccgaagcaagggaaagccttggcgaaaaacaataacttcttgtcggaaaaagtttcggtcagaaactggtgcgtcatgcgacctcccctaagcgaagcatccccatgcagtcgcgattttctgctgagattatacgtctcacccagaaaaaatctggttacgcggcaagaaacaacacctttcgtgccgttccgaagagggtatgcaacctcatttgtgctacctgcgtttttcgaaaacgcacggttcgtagctcgtgtgtcctttggttcgaactcatagtgagcggtgtaaatctatacgttctgattaccgggacgccgaagagggaacggaggtgaaagagcaagatgggaaatgcgaagaaaaatcgacggactgtgggttcatgggctgtaatgatcatgatgatgctggctgctgtgtctttcgtcggaatggctgggtgcgctccccgccaaacagagcccgctccctcaggccagggcggggataattcagtcgtgatggtggcgtggacgcccgacatggagtgttcttcgtgccatgtcaaagaggccgagtcgagttccgatacggcttgtttggcgagcaagcatggtgaggccacatgcgaaagctgtcatggatctgcagatttgcttgcggctgtgcacacggacgcttcggcttcgtccgagatgccgacgaagctgagcaagagcaacgaggtgtctgaagaggcatgtttggcctgtcatggcagctgggacgagctcgcggagaagagcgtcgaggttacggtcttaaccgatgccgacggaacggtggtcaaccctcattcgatgaacaggacgggcgatcatcaagttatcacttgcgatagctgtcatgtcgaacatgctccagaaaaggatcaaaaagagctttgcctaagctgccatcatgaagacgtatttgaatgcgggacgtgccatgaatagcgagtggctatacgaaatcaagacagaagcaaaaccgaaaggggattaatatggggatcaaagatgagtcagggttagcccgtcgtgattttcttaaaggtgctgcaatcattgccgcaggtgcggctgcggctgggatgtcgggttgctcgacagagtcaagttcggctgaagcatccgaaagacgccctggagaaccggaggtatgggacaccgagaccgatgttgtggtcatggggtatggtttcgccggtcaagcctccgccatcagcgctgcagctgccggatccaatgttgtgatatttgaaaaagctcccgaagagcacaaaggcggcaatagcgccgtgtgctgcgggttcctcaacatctgctcgggcgacggcgctgccgaagcatggaaagcgataaccgatggtggcgtttcggatgcggagtgcgaggcggtggcgaaagcttcgacggaaatgccccagtggttcagcgacaatatcgtggagagcgaagttgttatcaaagagggagcagatgccgtgcgcaagctttggggcaaagactatccggatgcgaactcggtgaatctgaccatagaaggcaagggccagacgggcggaggagcttaccttcacgagctgtgcgcaggtgtgatagccgatcggtatggggattcgatctccattctgtacggtacgcccgtgaccgatttggtatatgacgatgaggcgaaagaagtgcttggggtacagtatgaagaaggtggttcaaccaagtactgtaaggcaaaaaaaggcgtcatcatggcgtgcggaggctatgaggggaatccgcaaatgatcgaggatttcgttttgacgcattacaaacagtatccgatcggaactccctacaatacgggtgacggcattcgcatggtagcaaagatcggcgccaagctacgccatatggcagctgtcgaatacggatcgcccgcatgtttggagctatctgaaaagtacaatcaagctattgcgtgctacaacggcggcgacactacgtctatgatctatgttagccagcacggcgagcgattcatgagcgaggatggcaaatggcctgctcacgataagcgctatccgtacccatgcttcgccgaaaacaaagataccgccgaaaccccgaactatccttggtggatggtgtttgacgagacgcgacgggcgaaaggcactctattcgcatggtcgaatgcggagcgcaacgagggatgggctgctgttcacaatgtgtatcagtggtccgatgacaacatgaaggaaatagaggatggcgttgtcttgaaggccgattccattgaggagctcggtatgcaaatgggtttaaccgacgacgacttggcgacattcgtggcaacggtggaaaagttcaatgccgacgttgctgacggcggtaccgatagcgtgttcggacgtgctcctgtgcagtcggcaaaaggtgaggttaccccagtcaatcctttggagaccccgccgttctatgcggtcaagtgctgtatatcgtatctcaacacaaatggcggccctgcgcgaaacgaaaaatggcaagcactcgactggaacgatgaacccatcgggcgtttgtattcggcgggcgagtttggctctgtgttctaccattactattggggcggtggaaatgtgaacgaatgcttcgcgagtggcatggttgcgggtcaagaggcgaatgccttgtcgccctggaacgagtagaggggcagagggactcattttcgtcggccaactgagtgatgcggcaggttgttgtctgctgcatcactcatgcttatgtcagtgatttcctttggcttggcttgtcgtgccgccgctgtggcgcaacgagctacgcgagttcccgtacgttgagaaaggcaaggcagctcagtctatttttctgcaagcttctttccgaccatgcggccaaaggtcgcgcagcgtccggcgttgatgcctacggcgaggttcggatacgttcccgcgtagaatccaccctggtcgttgccgatcacgtatacgccttcgatgggagcgccgtcttccccgtaaggctgtagattttcgttcaccaaaatgccgtcaagggtgcagagcgtgagaccgcatgatttcacggtaccgtagaacgggggattgcgaagctcggtcaggcggaacggttctttgccgaaatcggggtccgcttgattgtcgaagttttcgttctgcctctcgcaggtggcgagaaacgcttctttgtcggtgatgcccagtttatcggcaagttcttcgagcgtgtcggctttctggatatagccggcttccacgaattcttccatttcgggggcaatccactcgtcgaccatttcgggccatgcatcatggtcggcaccttcgtggtagcagatggtcgagcatccggtggtgtgcaggcgatagatgtcgtcttgccagttcgaatcccagatctggtgccagaagcgatcgccttcggggcgtttcgacgaagcgttcatcacgaaatcgtagggagcgctttcgttgtggaagcggttgccggcatggtcgacgcgcaaaaacggctgcgagctgaagaagtaatacccgtagttcgctcccgtcgtgtaagcatcgccgacctcctggtcttctgtgagcaggcatcggttgaacgtaagcgaagtgtgcacggcatccatcttcgcgccgatacgcatgagcgccttgattccatcgcctgtacaggtggggaatgcatcgaacgttcccaggcaagacaggcgcgtcggttgcagtgcggcatacatatcctgattgtacgcatagccgcctgtggctacgatgacgcctttcgaggcattgatgcgaatgtagccgtctgcacccttagcgtaggcgcccacgactttgccgtcttcgacgatcaggctctccatcggcgtttcgaagcgctcttcgcacccgggaaacgaggtgatgtaggcgtcgaggatctgcgcgacatcctgttcgcgcgaggggtattccccgttcgtgccgtgtcccgtggcccactctttgtaatacgtgccttcgggcatgttccactcaagctgcactaccatgtcgttttcggccatgaggtcggtgtaccagtcgatggcctcgccggagttctccgcccatttgcgtacgaggcgcgcgtcgatttggccgagcgcgtaatgatccatgtcgttaacgatgtcggcgggttcgatggatacgccgtgttcctgctgctgtttcgagttgacggctcccagtgccgaagacctgacggagttgcccgcagtcgacttttcgatgagcagcgttttcagcccgctttcggctgccgaagcggccgcgaagtatcccgaggtaccggcgccgacaacgagcacgtcgaaatcgagcgtttccgtgcagtcggcatcgtcgatctggggtgcttcgccgagccaatcgacttgcgccgtgctgcctgcggcgttcggggcgctttcggcgatggcttcgccattccctttcgccttcggtgagcagcctgccatagctccgagtgctgcaagagcgcctgtggcggcggctcccgtaagaaacgtgcggcggctgacggttgatttcgattcctgttgcatgagaatccctccttgatcctgtttgcccgagtgcctttcggcgtaagaagcatgcgacaggtgtcggaggaaaacatcgcctgaaagctggatagttcggttttcacctagaataggtgacggaaattccatgggtgacccctatgatgtcgagagtggatgggagatgcgcggccggccgatggtgcgcccgcatgccaggaggatcgatgcaacgtttcgctgcggtgagaaaaaacagcttggctgctgcattggccaagcttgaggagaatctgaaagtccgctatctcggaatcggcttcgtgtgggcttggatctactgctcgttcgaaacgtcggcggtgtacccggatcgcgacggcatcagcatcaacgccgatccctcgtggctcgcgtcggcgaccgtggtggttgtggcgctcgtcgcgttcggcgttgcgtttcggaacagcgatctttcgaaggcgaggcggatgcgcgtggcagcgcccgtgctcgttgctttcggaaccgttttatcgggcgtcgttccgcttatcggcggggcaccgttgatcttctacggcatcagcggcattgcgaccggcactggcactgcgctgctctgcctgctttggggcgatgccctctcacgtcttgagatcgagcagatcgagatagccgtgcccgcggcttcgctggttacgtttctctgctgcttggtttttccctatatccagggcgcgcccggcattcttgccgttgcgtcgcttccccttgtctcgggagcgctgctcggcttgttctatcgcggtgccgccgtgaaaccccgtgtcgcccgaccttccagcgcgtccgagcaaggggcaatcggaaacttggtgcgcattgcgcttgttctgttcgcagcgtacttcatcatcggatgtctgggtgctatgagcgaatcggaagacctcatgcagcaggcttttggcatcgatgtgccgacgatcatcgggtcgggcttcgggctggtgcttgccgtgtgcttcatcatgttttcggtgcggatagatttcatttcgctgttccgctggctcgcccccttgctcgtgcttgcggtcgccctgtttccttggcaggaggtcatgccgaatttcatctcgacgaccatcacctgcattgccgatacgtcgatgcaggtgattacgtatatctacgtaataggacttgcgaagcgctcctctatttcggcggtgctcggcatcgggatcacccagggatttgtacagcttggagttttaacaggaaacctcgccggcgtgcaggcgggctcggcggttaccgagggatcactcagcgtgttcgttctcgcgctcagcttgatctgcctgctttccttcgccacgatgctcgtaccgcagggtggccgaaagcagtttccccgaagttccgctgctgctttatcggttgacgacggatcggtaatcgagcggcaatgcggcgatttctccgaacgattcggcctctctgcgcgcgaaagggaagtgctcgaataccttgcacggggccgctcgcagccctacatccgcgacgagctgcttctgtcgaaaaacaccgtcgcgacgcatgtgaagcacatttaccagaagctcggcgttcactcgcgtcaagaactgctcgatctgttcgagggggatgagggataggatcgaggtcggctttctattgccagtaaccatcgcgaccagcacttttgtcagcattcatccttttcgtgtcacagggttgattcctttcgtgcgatagcgcggcatcgtcgaggttcatagtggtgcccgccagccgacgaagggattcggctcggaacctgaaaaggaaggatgaacatcatgggagaagcaactgcaaccaaccaaagcgggctttcgcggaggaactttctcaagggcgctggagttggtgcggcggggctgctcggcgctgctgctctgagcgcatgctcgtcgggaaccccggcggcatcggctgacgcgaaaagcgcagcagatataacgtgggatgaggagaccgacgtcgtcgttgtcggctcgggcgctgccggcgtcgcctcggcgatggcggctctcgatgcgggcgccgaggttatcatgatcgacaagcagcctgtgctcggcggcattacaagcgtgtgcgaacagtactgcgcttacgattcctcgttgcaccttcctcaaaacttcgacgatgtcgaggacagcgctgaaatcatgctcgaagacgcgatgcgggtgtcgtatggaaccgccgatcgcgagctcgccaagatctattgcgatcgctcggcggaaaccatcgactggatgctcgagcatggctgcgaattcaaagacactctccgcgtttccgacggccgccacggccagggcaagtacatccttgcggcgccgggcgatctgactaccaagttcaccgccgatatcgaagcggcgggcggcaagaccatgaccgacatgcccctgaccgaacttgtgcgcgatgcggaaagcggcaaggtcgtcggtgtggcgtgcgatgagggaacaacccacatcaaggcacgcaagggtgttgtgatctgcacgggcccatggtccgacgacgaggttatgatcccccgccatgttcatgaaacccccgaggtgccccggaagtgcgccgagacgctggccgccttcggcatgccgtacggaccctatacaggagaggctatccgttcggcgcaaagcatcggagcggcgacgcgccatatggaatacgtcatgttcgatccgtactactccgttcccgaaatcatggagcagcgcatcgctcctgccggtctcacgcgtgccgtgaaccagatcctcgtcacgcccgagggcaagcgcttcaccgacgaggggaaatcacgcggcgccatcgccgacgatatccttgcgctcgagggcaacgtgtactatcccgtcatcgacaagcgacacctgcccgatccgaccggatcgatcaagttccccgtcgaaaaactcgacgaatgggtcgagatgggcattatggcgaagggcgaaacgcttgaggagcttgcgtcctcgatggaggccaacctgggcattcccgccgacgcagcgctcgagacgatcacacgttacaacggcttctgcgaagcgggcgaagatgccgatttcggcaaggatccccaccatatgacgcccctcgaccagccgccgttctatgcgggtcctgcagaaacctgccgcgtcatgtacacccacggcggtcttgagaccgatgccgaggcacgcgtggtcgatttggatggagcagtcatccctggcctctatgctgcgggaatgtgcacgggcggcccgctcgggtacatcaccatctcgggcaactggcagatgagctcgctcgtgttcgggcgcatcgccggcgaaaacgcggcggccgagtcgcctgcggagtagcggctgaccaaaccctgggggcaacggcccgccgccctgcagagttgcggctggccggtcctcgggagttgcttttggcccgcgagtgcttttcgcgggatgctcggcctggcgagcaggacgtttcgtgccaaggaggcgggcctgccctggtcgtgcgtcgcgcctgcccgctatccctgtggcaggagatttgctccgagttttaagcgagcggcgtccaaaaatatttattgtctatgaagtacaacgggacattgaccagccaactttcgacgcggtagttcgatagcgagaatcggcgcgcctgaacctcggggtatttttccttgaagcttctgaggctctttgcgcgcaaattctcttcggccttgacttcgatagggtagacggtccccgcgttttgcacgatgaaatctatttctccgcgcgaattttctgccgaccagtaccaaggcttcaagccgcatgcggaaattaattgctggcagacgtattgctcggtgagcgcgcccttgaattcttcgaagagggagtttccctctaagatgctgcgagcgtcaagatcgctcatggctccaaggattcccacatccagcgcgaacactttgaatgctctgggatcgcggtatgctttcagcggaattcccggcttggtcacacggggaaccacgtgcacgagcccggcctgcgagagccaggtgatggcgctctcgaagtccttcgcccggctgccttttgcaatgcgaccgaacacgaacttcttgttctcttgcgagaggtgtgcgggaagggaattccagaccgcataagctcgttgcgcctcgcgtgcatcgagatgtttggagaaatcgcgctcgtagtcggccgcgatgcggttctgcaccgttcgggctgctgcataattcgaattctcgccaaacgatacgacggcttcgggcattcccccaacatagtaataatccttcagcagcgatacgacctttgttttgaatgtttcgagtatgagcggattgtcgccttcaatcaggtcggcaagtcgatttcccgcttgcgctcgcacgaattcgccgaacgacaagggatacaaattgagcgtttccacttttcctacagggaacgacgcctctcgatggagggctatgccgagaagcgatccggctgcgatgatgtgatactcgggggcgttctcgcaaaagtacttgagggatgtgagcgctttcgggttttcctggatctcatcgaacacgatgagcgttgtggcgggatcgacggagatccctgtttcaagttctattccgatgatcaggcgcgctatgtcgtaatcgccttcgaacagctggcgcatcgctgcgttgttgtccatgttgacatacgccacctgctcgtatgcgcgtcggccgaactctttgataagccatgtctttccgacttggcgtgcgccgttgacgatcagcggcttccgtccaccgcagtctttccatgcgagcaggctttgcataagagctcgttccattgtgatgtctcctaaccacggcagaatgaaaccattataggtacttcgcaaaaacaaggacataaaagtgtcgaaatcgacaaaaaaaaggacgaaaaaatgcgaatctgaacaataatcaggatgaagtgccagaggagaagcgcggcggacgcctattgggagggttcggttttaccggtgaggatccaagatccttttgtgcggcccgattggtcgaccgcgtgacgaacggcatcccaaagaaaaagccccctgacgggcgcaagcttcgctgcgctcccagcggcattgtatcaagctatctctactgaccttatgggcgttgatgctggtgaatcgaaagctccatgcgttcgatcagattcagcagttcctgtctcgaatggatttccattttggcataggcccttctcaggtgcgatttcacggtgtgctccgaaagcatgtagcaatcggcgatgtagcgggcgctgcggcctgtcgagaattcgccgatcacttggaattcacgttccgagagcgcaaacgtttcccgcagcaattcgagcgatgcatcggtgagcgcaaccgatgtggtaatcgaatcgcccatctcgtcgggcgcgtcggtgtagcggtgctctttgctcttggcgaaaaagcgcaggtagcttataaatatcgccgccaacgaaaaagcgagtagcgaaatcacgcacgtgatggccgtaagcggacgctcgacaagtgcggcaagcgcgggcgtcagcgccaacgtgcgcccggcggcgatcgaaagctgggctgttcccactgcaaggccgagcaggaaaaacgccggcagctttctctcgtgggcttcgcttacgaacgtcatccagagcattgcgaaaaacgtgatgagcagtacgaccatgagattgcccggcaaagcgtcgtcgaaagatgcgatgcttcgatagagaaggatgccgacaaggcacgccgttgcaatcggatacgttatatcggtgttcgcctttttcggtttggcgatgatcagcgcaacgcacataaccgaggccaccccgatgccgatgatcgcagtgaggtcggtttgcgcatattcgatcccgttcgcgatatccatctgcacgatgaaaccgcaggaggcggaaaacacgagcgtgcctgcgatcgcccgtttggttcgtgcgacaagctcggtcatcgacgtatcgggtgccgcgtccccctgcatggccttggcgatgccgtcattgtttttcaggcagactcccaaagcgatgagggacaaaccaacggtgacgagcagggcgagatttcgactttcggggaagaggacgtttgcgagcggcaccgaaagcatgtcgacaatgtagccgccggctatcatgggcaaagaatagaccgggcggtagctcgtgaaaacctgcattcagcacagaatgacaagcgcccacccgatgccggcgatgatctgggaaacaaacagcacggtatcggtggttgcgggaatgaaggatagtgcgaagcgcaaggccatcgcaacgaggctcgcaaagaagacggggcgggtttcgttgagcctgctgaagtacgacagaagcgcaatggccagataggcgacgccgcctgccgctatgccgatgatggcgaaaggctcgggggaatacggccccgttccgaggtcgatgatccgcgcaccctggagaagcccgaatccgacgacggtcagcgccatgagcgcagcggtctttcgcgtgatgacggcttgcgaacccatggactcccttccgtccagtgccggcgaagcgctacctcagcagatccgcgatcttgccgatgataagctcgaagctcacgccgcgctccttgaaatcgggctgcttgctcgagacgatcatcgcgtcgtgaacgaagtcgcccgcaaatgcgacggcctcctgcaagctcttgcctgccatgatggcggcgagcaaacacgagcagtacagatcgcccgtaccgtggagcatgtaggggaggtattcgttcttcgcctcgaacagctcgcagttctcgcctgcgacgaagttgcggatgcaggtttcgccctcgcgctggatgcccttgagcacgacgttcttggctccctttgcaagcagcctctcgattatgcgtttggcggtgtcgtcgtcgatatcggtgcctggccagtcctctccgaggatgatggacgcttcggtgaggttcggcgtaaggatgtcggctccgcaggcaagctcggccatcgcgtcgcagagctcgggcgtgtaggtggggtagaccttgccgtgatcggccatgacgggatcgactacgcgcagagcgttcgggtacatgttgtacagatcgcggatgcgatcgacctgctcgggcgctccgaggaaacccgaatacaccgcgtcgatctcgacgccgatgtttttccaggcggccaggtaatctgggagcatatcggtggtatcgtgcatgtaccagccggggtatgccgtatgggaggagaacagcccggtcggcacggggcatacatcgcaacccgctgcggaaagaacggggatggccacgccgagcgagcacttgccgtagccgcacagatcgtggacggcggcgatgcggggaatgtagtcgccttcgcgcttgtagaggtgcaggtcttggagtgacatcgggtcatcgccttcttcgtgtcatcgcgtgcttgcgcaacgcggcatctacgggtaacaggtaacacgatatcgcgcgcgaagaaaaaacggcgcaggtgctaccgattcgttatcgacgggttgttcgctatttggactcttcgtcctcgtcctcatcgtcgtcatcgaagaacgaccagtcgtcttcggtgggctcgtggttcgtgaaccgcttgcgcgttctccgctccatgatgacgcttgcaataatgctcagcaccaagccggccaagacgagcacgccgatgcccgggacggtctcaaacaagaaatgatagagttctccgagatccatgagtgcctttccgatttatataagggctgatcaacaaattgtcatcgaacgagcccattcgcatagaactatattttagtagagtatactatgcccgatcaagagtgggtatggcgtggcatcataaatcctccgtttggtttatgggcggccgtcgaatgatgagcgggagtagagagcgtgcggccacgaaagagaaaacagcatagcaactatgttttgttcgttatcgtttcggttgtcgtcgtgctggccgttctcgccgcctcggtaagcttgcttgctcatatcgaccagaagcttcgccagggggccgagcagcaggtcacgacgtttaccgagcaggcggcgagcaacgtgagcgatcgcatgactgcagtgcagaacgcgattggcgccttcggcatcgaaaccgccgatcccgaacgggtgcggcctgtgatggaggaattcaagaaccggttcggcttcgcatccgttgcgtttgcgggcgtcgacggcatcggggtctattccgacggcgcgccgttcgaggtcggcgatctcaagatggccgaaacggccctctcgcttgagaagccttcgtattcggccaactacgatctgggcggggggcagcgcggcaagctcgcccagaaccccctctacatcgacggggttctcgtcggagccctttacgtcgagattccgagcagcatgttttcgatggagcgcagcctcgatatgttcgatggacgcggctacttcatcctgttcgatggcgaaactcaggagatcatcgttcctccgaccgaggaaacccgggttcccataacgaccgatacgctgatctacgatttcctctacgagtcgcagcagacggctggcggcaaggatacgctgttccgcaacgatcagtacgcgcaggaaaagaactacatcgcgctgctgcagcgcgcggttgcagacgagcgctgcgatctgttcaccggcgtgatcgacgggaaagaaagctacgtgtgcgttgcgcccgtctatgcgggcaactggttcgtatgcaacgtcatccccgtcgagaacgtgcgtgcggagggaagcgccgtcatggctgccttccaggttgttttcgccctagccatcacatgtctgctcatcgttctcgtcgtgtcctacctgttctaccgcaagcgcatgcaggaacgcggcgtcgaaatgaaaacccgcctgtacggagctctttcggaaagcctcgatatggcggtgaacatgtattcgcccgacgatgcggtcgtcacgcccatcgtagccaaggcgcgcgaaatcttcggcttccccatggcggacatcatgggcaaaagcagcgtttccgacgaaatcgcgctttcggacgagggccgcgaactgctcgatcgcatacggcatggggaaatcgagagcctcgagcagggggagttcgcgtttagggaaccatggagcggacggccgagctgggtgttctattcggttacgccattcgaatacgagggcaagccgcaactgctcgtggtgtttcgggatgtgactgacgagaagacgctgcaggtttcgatgagcgatgcgatggttgccgccgaaacggcgaacaaggcgaaatcggatttcctatcgaatatgagccacgagatcagaacgcctatgaacgccatcgtcggcatggctcagatcgcccgcaagaacctcgatgacgcggagcggctcagggaaagcctcgacaagatcgatcttgcttccgaccatctgctcaccatcatcaacgacgtgctcgacatatccaagatcgaaagcgggaagatgatcctcgcaagcgaggtgttcagcctttccgacgtgatcgagcgcgtggccgccggcatcaagggacaatgcgatgcgaaaaaccaaacgctcacgctcaaacggtacggcatcgatgccgatgcgtttgtgggcgatcaggtcaggcttcgccaaatgcttttgaacctgctggtcaacgcttcgaaatacacgccggcgggcggacatatcagcttcgaggtgtcggagaagccgagcaacgtgaagaaatacacccacgtgacgttcgtcgtcgccgacgatggcatcggcatgagcgaggagtacatcgagcacctgttcgagccgtttgtcatggagggtcgatcttcggtgcagggtacagggctcggcatgcccatcgtgaagaacatcgtcacgatgctcaacggcgatatccgagtcgaaagcgagctcgagcgggggactacgttcacggtttcgatcacgctgctgcgcgcgaccgaagacgagaagaacctgcttgtggccgatgcgcccgcttccaagctgccttgtacacgcgttacgctggatgagagcgaaagcagcaagctcgtcggattgcgcgttctgcttgccgaggacaacgatctcaatgccgagatcgccaaagagctgcttgccgatgccgggctcgaagtcgactgggcggaaaacggcgagcgcgcttgcgagctgttcgaagcttccgaaccgggcttctacgatgtcgtgcttatggatatccagatgcccatcatgaacggctacgaggccgcgcggacgatccgggccctcgagcgcgaagatgccgccacggtgccgatcatcgccatgtcggccaacgcgttcatggaggatgtggaggaatcgttgcgctgcgggatgaacgctcatctttcgaagccgatcgacatggcccaggtgctggcaaccatatccgagcagatcggccgtgcgcaggatgcgtctggagaaaacgcaccccgccgataattcgtctgcgctatactagggcgaaaccggctacaaagaacgatcgagacgtgaggagcgcagtcgtatgctagacattcgatttgtccgagaaaaccaagaggcagtcgccaccgcgatgaagaaccgcaacgcttcatgggattcctcgcgtttctccgagctcgacgaggcgcgccgcgcggtcatcaccgaagaggaggcgctgcaggcggagcgcaatgccgcctcgaaagccatcggccagatgatggcgcagggcaagaaggacgaggcggaagctgccaaagaccaggtacgcgccatcaacgagaagatcgccgctctttccgaaaagcgcgaggccaccgaaggcgccctgaacgatctgctgctcgccacgccgaacatgccagccgattctacgcccgtgggcgccgacgagaacgacaaccccgaagttcgccgctggggcgttcccaccgagttcgatttcgaatacaaggctcattgggatctgggccccgaattgggcatcatcgatttcgagcgtgcggtgaagcttgcgaaaagccgtttcattctgctcggcggtcttggggcccgtctcgaacgcgcgctcatcaacttcatggccgatacccacacctcccgcgggtacaaggagtggtggtgcccggcgatggccaacgccgatacgctgacgggtaccggtcaacttccgaagttcgaagaggatctgttcaaaacgaccgaggggctctatctcattcccactgccgaagtgcagctcaccaacattcattccggcgaagtgcttgaagcggatcagcttccgctcaagtactgcgcgttcaccccgtgcttccgcgaagaggcgggcagtgccgggcgcgatacgcgcggcctcatccgcgtgcaccagttcgataaagtcgagatggtcaagtacgccaagcccgaggaaagctacgacgatctcgaagcgatggtcgaggatgccgagaacatcctgcagcttctgggcctgccgtatcgcgtgatctcgctgtgtacgggagacatcggcttctccgccgcgaagacttacgatctggaggtgtggctgccctcctacaacgggtacaaggagatatcctcgtgctcgaactgcaccgatttccaggcgcggcgcgcgaacatcaagtaccgcgaccctgcaaacttcaagggatcgcgcttcgtgcacacgctcaacggctccgggctcgcggtcggtcgcacgatggctgccatcatcgagaactaccagcgggcagacggctccatcaaggttcccgatgtgcttgtgccctacatgggcggcgtggaagtcatcgagaaggtgtaaaggccggcggatccaagaacgtggctgcaaaacaaacggcaaagcgcaaaagcgtaaagggcgaaccccgaagcgcgaagacgagcggctcgaaagcgaaaggctcgaaggcgtcttcggcgggaaaggggcgcaaaagcaacgcgaagcaaccgaagaagcgtcggtggcttcgcgttgccgcaatcttgctcgttgtcgccatcgtggcgattctggcagcgttttcctgggatcgatggttccgcttcgacgatgcggccgatgtgcagggcagctggcaggcttccgggcaggctgcggtcgtcgtgatcgacggcgagcagatgcatctcaccgacgaggttgcttacgagtacgcgctcgatacgggtgcgaaaaccatcgaattctcgttcggcaagctaacgggttcgggcacgtaccggttctcgggcgatcgccagactcttacgatcgtcgagggagggagctccgatgtcgtcagggatttcctgcgattcttcggcctcgacatcggcgccgagagcgaagccgacctccctacgaccgtattcgaaaaggtggcgtcgggctctgctgcgggaggcgatgccgctgcggggggcgatgccgatgacgacaaaccggcagacggacaagcgggcgagggttcgcctgacggcttgccggatgcgacgggagatgccgccgatgcgggcgacggcgatgaggatgcgggcggatcggcctcaggcgacgcgccgagcggagacgcttcgggcggcgatgcggaaggcgggaaccctgcagcagacgatggcatgctgttcgattcgctcaacgatcggggcgtttcgccgtgacggacgccgcgcggccgcttcgcatcgatgcgctgacggtgcagccggggcgtatcgtctgcgaggtttcggtcgatcccgcacgccgctatactacgccgaagctcgctgcatcgatgtgcgaggatcatccgagccttgcgagccatgcctgcgtgaacgacgagggggacaccttcggctgcgtcatcgggcatacgtcggttccgcatctgctcgagcatctggttatcgatatgcaggttcgggcgggcggccgaagcgatgccaccttcgtcggaacgacggaatggaccgacgaagctcagggatttgcgaccgtccaggtgagtttcaccgacgatttggtcgcgttacgggcttttcgtgatgcagccgagaaaatcaacggcgcaatgctaaagtaaagcaatgtcatccgcgcatatcatattcgatcagacggccgacaaagtcgccaaccgcgtcaacaagatgcgaacttctgctgtgcgcgatctgttcgccgctgcatcgcgctccgatatcatctcgctttcgggcggcatgcccgacgtctccctgctcccgccaagcgccatcaaaaaggccatgaaggcagctgccgaagacgaccgtgccgtcgcgctgcagtacggatcgaccgatggccgcgttgaaaccaagcgcgtgttctgcgatctcatgcgcgatgtgggggttcgctgcaagcccgaagaggtcatgatcacgagcggtgcccaagaggcgctcgatctcatcgccaaggcgttcatagacccgggcgatatcattttggcggagggcccgacgtacctgggtgcgttgcaggcgttttccgcatacgagcccgatgtgcgttgcattcccttcgatcgcgagggcatgaggatggatctgctcgaagccgagcttgagaaaatcggcaagggcgcggcgaagttcctctacactataccgaatttccagaacccgggcggcgtcaccatgtcgcctgctcggcggcagcgtttgctcgagcttgccgaggaatacgatttcttcgtcgtggaagacgatccgtacggccgccttcgctacgacggcggacatgtcaagccgctcaaggccttgaacgaccaggtggtctatctcggcaccgtatcgaaggtgttcgcgcctggcttgaggacgggctgggtcgttgccccgaagagctttttgtccaagctcaacttggtcaagcagggcaccgatctgtgcggaagcgcattcaaccaggtggtcgtggaacactatttcaccgataccccctggcagaagacgttgcagaagttcgtcgaaacgtacaagacccggcgcgatgccatgctcgctgcgcttgagaagcatttcccgcccgaggcgacctggacccacccggaaggcggtttcttcgtatgggtgacgctgcccgagtacgtcgacacgggatcgatgttgtcggtcgcactcgaaaagggcgtgacgtacacgccgggcgatggctttttccccggagcttcggcggggcagaactgcatgcggctcgccttctgcttcgaagatccggataaccttgaagaggcgatccgtcgccttgccgccgtcatcgaagatcaactcgagctgtatcgggtgttcatcgaggcgggcgccatcaaggcagagggacaacgggaatctgcagcgcagtaagcctgagggcgggcgagctgcgtgcgtttgcatatccgatccggcgttgcagacagcgcgccgaaacgagacgataaggaagcagcatgaaggtagcagttttgatgggcggaagctcgttcgaacgtgaattctccttggcgagcggcaagcaggtctgcgatgcgctcgaagaggccggccacaaggttgtgccgctcgatacgacgtccgatcttgtgccgaccctgcgcagcgaacgccccgatgtcgcttacagcgccctgcacggcaagcacggcgaagacggcaccatccaaagcctgctcgagtttctcgacatccccttcgtcggctcgcctgcaagcgtatgccgaagcacctggaacaaggattcgcttcatacgaccatggcggcctaccgtgccgctaccggcgacgcccccatcgcgtcatggcctcagggcatcagcatcgctcgcgacgcgttcaaagatatgggagcggcaaccgcgctcgatttggtcgaggagcgcgtgatcggcggctatcccgtggcggtcaagcccgctcatggcgggtcggccttgggcgttcatcgcgttgattgcatcgaagatctgggcgaggcgatactcgacgccctctctttcgacgaacatgtggttatcgagcagtggatcgagggcgtggagatggccgtatcgattctgggcgaggggtgggatgcccatgcgcttcccccggttgagatcgtgccgaagacgggattgtacgataccgcagcgcgcctcgatgccgatgccgttgatttctatgcgcccgtcaggcttgaatcgctctcccacgacgaagcgcaggcgcaggccatccgcgccgaaatcgaacgtgcggctcttgaagtgtaccgcgcctacgatttgcgcgacctgggccgtatcgatgtcatttgggatggcgctcaagcgcgagtgatcgagaccaatgtttctccgggcatgaccgagctctcgctgttccccgcggcttgcgcggcggcgggtctctccctttcaggtgttctcgaccgcttggtcagccagtacgcgtaaaagttcggggcgcaaaaccgccgtattcgcatcggtgacggttaggcaactgtttcgtggggtagggatgttttaaaggggcctgcagatgcgatgccctataatgtggctcatcgaaagcaatcccaaaggaggcaattatgggtaacaaaggattcggagcgtttctcgcaggcggagcgatcggcgcggtcatagcgctcctgtatgctccccgcagcggttccgagacccgtgcgatggtatccgacaaggtcggtgcggcttggggcgaggctcaggaattcggagcccaggcttccgagaacgtccagcagttctaccaggatgcaactgccaaaggcaccgaagtggcgcagaacgttgccgcaaagggccaggaggttgtaagcaacgcgtcgtctaaggtgcaggaagccgccagcaacgtgaagccggtgttttccgagaagaacgacgagcttcgcgagaagatcgaagcggcacgccagcgcattgcttctcaggttgccaagaacgccgaggccgcccatgatgcggttagcgagaagattcccgtagccgccgatgcggcgcaaaacgttgccgagaaggcgcacgacgcgctcgattccgtggctgtcaagatttcaggcagcgaatcggacgagccggtgcaggacaaggcggccgatgcagccgaagagaccgtcgacaaggttgccggcgccgtttccgatgcagccgatgctgcgaaggacgctgcagacggcaaatagccaaacgcgaggtttgccgcgcactgcggtttgcggtgcgcgaaccgcgcaggcttttcacgatcctgtcagatcacgagaaaatagggcatccgagcgatcgggtgcccttggaaactgaagcatggctaagaactccattacaaccaacgaggttatcggcacccgagtgatcgggggcaaaaagggaacgcggcgtatcggaaaggtgcgccgtatcgtgtttcatcccaaggagaagcgcgttgtgggcttcatcgtcaagaggcccgatctgctgtggatgtttcgtcggaaggacaaattcgtcgctatcgacggatacgacctcatcgatggccgcatctgtattaggctcgaggccgaagcgaccgatcgcgccgcctgcaaacggcttgggatcgaatgggacgattgcgttttgtggatcgggctgcccatactcgccgaagacggcactgaattcggctttgtcggcaatgtggtgttcgatcgcaagacgggtgccgtcgaaagcgtcgaaaccgacgcgggcgctacgtcgaacgcgcttctgggcaagcgcgagatccccgcggagcttatcacgggcttcaaacgcggcataggcgccaaaatcgcccagaccggaaaagaaggcgtgcaaaccgacaacgcggagtacggtgccattctggtttccgatgaagtgaaggatatcgttgccgagggggggcttgccgagaaggcgggtgccgcaacggcggttgccgccgataaagcgggcaaggccgtcaagaaaaccggcgaggcggtcaacaaaggagcgaaagttgtaggcgagcgcgccggggcgacgaaggaaggcttcgtcggtttcaaagaagagttccaaaaagagagcggcgccgccgagaagaaggctgcgctcgaaggcgaggttgaggaaaccgaatctgctggagagcagatcggaaaggccgtcaaccagggagccaaggcggtcggcaagcagatcaagaaatcgaaaggcatgttctccgccttcaaagaggaatacgacaaagcacgccacgacgactgatgaagttggaaaagaaaagggtctatgacgcataaacgcagcaacgagccgtcggaacgcaaaacaaccggcaacaccggcaaaattcacgccatcaaagaagatgtgcacgagaagcgggaagagcttcacgagaaaaaagaggagcttgccgaaaagtcgcatcagcgtgtgaaaatcggcaacaagtcgttcgagaagggcgacatcatcaaattcgcagggcttatcgccttcttcttggtgatgctgctcgtctgcgtgctcatcttcccctacatcaaagagctcttcgagccaggtggcgtggagcgcgtgatcgacaaggtgcgcgatgcgggcccggttggggtgttcattcttctcggactacagtttttgcagatcgtcgtcgcgtttattcccggcgaagtcacccaggttgctgcgggcatgctctacgggccgtggttcggggcgctcatcatcctgatcggctgcatcatatcgagcgcgtttatctttgcgctcgtgcataagctcggtgcgccgttcgtgcagagcatggttcccaccaagtacctcgaaaagttccgttcgttcgagaagtcgggcaagctcaacatgatcgtgttcatcttgtttctgattcccggtcttccgaaagacgtgttcacctacctcgttccgcttaccgacatgcgcatgagggatttcgtggttctctcgaacataggccgaatacccggcgtgatcgtatcgacgtatgcagcggatggactggtcgacggccgcatctggcagagcgtcgttattttcgtcgttgctgcggtgatcgccgtgctcggcatcgcattcaaagacaagatcatggacgttgtgggcaaggcatccaagggcaaggacgaatgatatcttggcgcggcgcgcccttcgttcgcaaacgcgcatcggattcgcacatataccttaagaaataccgcgttggcgttaatcactgtgtcggccgtgcaacatggtttacgatactatgacggaacaacttatcctgtataccgctcggtatcatggtggcaacaattcgatcgagagaggtccgtcatggataccaaagacaacgatgcaaagccatcgatttccgatgagatagcagccgccgaagccgagctgagggcggcgcaagaaaagcttgacgcggcgaaggccaaagcgtcgctcgaaaatgcgcctgcgccgagtgctgccgcccaggccgttgccgatgatgcggcgcccgagtcggccaaaccggccgaggccgaggtcgtgtcggcgacggtcgtggctgccagcacgatcgagctcgaggcggagcccgtcaccgcacccgatgcgtctgcgcaagatcccaactgggtgccctatgcgcccgcagccgaacaaccccaaaccgcttggcaggagcctgcacctgcgccgggcggcgcaggttctccgcaggagcccgtcaacccgtatgccgattctcagcaggcagcggggcaggcgcagggcggttactactggcagcaaccccagcaggatgcgtacagcgggtacaacacgcagtacaaccagtacggcacgccgccgaacccctacgatgccgttccgccgcagcagcagtactatcagcagccttacgctcccgtagtggcctctaaggaccatgtggcagccggccttttggcgatcttcctcggatcgctcggtatccataagttctatctggggtacaacagcgccgggttcatcatgctcgccgtaaccatcctgggcggtttgatcactttcggcttggccgccgccgtcatgggcatcatcgcgtttatcgagggaattctgtacttggtgaagtcccaaagcgaattcgagcagatatacgtgttcaacaaacgggaatggttctagacgcctcgatgcagcaacggtattcggcgttcgtagcgttccccgatatttcttgtgaaaagcccatcgcccgtgggcttttcctatagaattggcccatggttttagttcctacaagggaattcctataaaggaggaagatatgcccaaaatcactcgcgatcaggtgaaggttcctgtcgacgtgatgccggaatcacgggaagagtacatcgacaacttcatgaaggccacgcgcggcaccggtcgtctcatgctgtttgcgtgcgaccagaagatcgagcatctcaatgccgatttctacggcgagggaatcgatatcgccgatgccgaacccgagcatctgttcaagatcgggagccagggcgtatgcggcgtgctggcgggccagcgcggcctgatagcccagtatgcggctgactatccggaaatcaactacctcgtgaagatgaattccaagaccaacatcgtgggcacgaagcaggaggatccctattccccgcagctctacgatctcgatgccgtgctcgccatgcgtgaagcgggcgtgaatatcgtcggtatcggctacaccatttacctcggttccgaattcgaatccaccatgatggccgaagcaggcgaactcattgcccaggctcatgccaacggcctcatcgtcgtgctgtggatttacccccgcggcaaggcggttaccgccgagaaggatcccgcgctcatcgccggtgccgctggcgttgccctttgcctgggcgccgatttcgtgaaggtcaatcctccgaaacccgaagacggcaccgctccggcggaagctctcaagatcgcctcgatggcttccggtcgctgcggcctcgtgtgcgccggcggttccacggttgacgccgagaccttccttacccagctctacgatcagatccatgttggtggcgcatgcggaaacgcaaccgggcgcaacatccatcagcgctcgctcgatgaggcggtgcgcctgaccaaggccatctctgccatcacgcttgccgatgcatcggttgaagatgcgctcgacatcttcaacggcgacgaggatttttcgctgtaaatcggcaaaaacacgtcaaacggtttcgaaggcctccttttcggaggccttcttgcgttcggggcgtctcacgtgtgcttggggcgtcacgatggtggaagtgtgctagtattgcgatttgggagttgcgcaagccgtgaggggtgcaataagggtgttcgaagccaaagagccaataggagatgtcctcgttccttttcgatgggatcttttagggtttggattttgccgcgcatgggttaccggctatttggcgtattcggctaatgaaatctggacttcaggggcttcgttgggtcttcaggttgctttgtaccttactgccgcaattgtcgcggcaatcgtggctttgctgtcaaaaaggatgatgcccgatcgtgttgcaggtatggctgtacctgctgtcggagcatttgcggcgataggaactctcggcatggcgtgcgtcatgttggggaagcttgatgccatcgatgcgcttttttatttcggtttcgttttgatcggtgcatgctgcggatttttcgagacggtttggggtataaaatttaccaaattgccgccatctggaatacagatatatacgctgttcgtaatggcagtgtcttctcttttaggcatcgccatgggcctgttaccaagctcggctttctttatcgtttcgttggtgcttttcggtgcgatggcctttctcttgcttgcaaaaccctctgggtcgatgttggccgcagaggcatcttcgaagaatgataccgattcagattcggcggctggcgaagcccgaatgcgcagcgggagggcgttggcgaatgttcttttgagttgtttggtgttttcccttatctacaatcttgttgtgtcaattacatatgatgctttgccgtccgagatggcttctcagatacggttctgggccaatctgctcgcggcgctaattcttttgtgtacgtttttactgatcaagcctttgagtgcggtctctctgttcaggcttattcttccaataaccgctgttgggttcgttctctacctcatttctcctgcagcgttcggcgagattgcgttaatgatttcgggggtaggtcgaaaattcttcgatatccttacctggatccttgttgcgagaacggttcaggtattcgggttctcccctttgcgttatttcggttttctaactgcggcgaaaaatctggggtacgcgtttggccttgtatttgcttcagttgccctcggtgcgcttgacgctcaggttattcaaatcgcaacgtttgttccgattcttttgttggcgctgatcgtctgctttttttggttgtttcccgaacggaccatcgacaacctgttcaacactctcccatccagcggatcagctctatcgtatgaggcgaccatggaagaaaacgctcgcgttttagcgaagaagcgtgggctgacaccgcgtgaaacagaagtgttgatgctgatggcaaaaggcagaaacctgtcggtcatcatggcgaaattgcatatatcgaagggaaccgcccatacccatatgacccacgtctatcaaaagcttggtgttcacgggcagcaggagctgatcggattagtcgaggaacctggtgattcgtagttggcggtcaatgcggatccgatgggagacggcgtgcctccgtctcccatcgcgctgtattacctgatgaaatggcatctagactcagggggtctagatgtcgtatgcagctatttccggtaaatcgacgcatggagtcgatgttctgtctgaggattttccgtagccttttcccatggtcgtttacaaggaaaggatgggttatgggagaaatcggtggatcatgcacaagcgtgtcgaggcgagggtttttgaaaggcgctgctgctggaatgcttggagctggggcgcttggcacgggactcgtttcgcttgccggatgcgcctcggagagcgctgccggctcgagtgggactgtgacggcatctgccattgcgcccggttacggtggcgatgtagaggttgagctgacggtcgatactgggagcggatccgttaaaaacgcaagtatcgaaggcaaattcgaaacaccgaatcgcggtggtcgtgcgatcgccgtgatgcaacaggaaatgatcgattctgaaagcattcaggttgacacggttgccggcgctacttttacctcgtctgctatccaagatgcttccacaactgcctacaatgatgcaatgggcgcttctggatccatggaagtcaagatggcaccaggcgaatacacggggaaggcaaagggttattggcagatatgggatttaccggtaaccattacagtcaatgagacttcgatactcaaaatcgagacgccaaccgatcggttcgagcatggcgaaacagaagtcattcttcaaagcgtgaaagatttgctgtttccccggataatcgaaagccaatcaattgcggtcgatgcggttgccggcgctacgtcatcgagcaatgcagttaaatcggcaatcaaacaggcgctgcaagaggcgctcgttgccggggggtcgaacgctgctgctgtgagcaagttccaagtggcacccgaaaaatcggaggtggggattaccgaagagattgacgtcgatgtgctcgtggttgggatgggaaccggtggcattgcggcaatgaagagcgcatgcgaatcgattcagcaactcaacgggggagggcgcgtgagcttgctcggcatcgatcgagctggcaagtacggaggaaaatcggcgctaacgcacgaaggatgcgcagtcaatccgcccgagtatcaagcggttaaaaacggcggcgaacctttcgtcgatgcagaggcgtttaagggtatctggaagcagtttacaacaactgacggtgagcagatggcaaaagaggagcttatcgatttgtacttcgaagagtccggccgcactatcgactggctatacgatatgggttggatttttggcgatatggggaagacgaatccttttaccaaaggtttaacaagctacaacgttgctttgacatcgaatgccgatgtgggaacctacgaggatcgccgtgcggtgctcgacacttattacaagcaaatgctcgctgagatcgcggcgcagggcggcaagtatctgcttgagacggaaggatacgaattcctcaccgatgatagcaaggttgtaggcgttaaggcccgtaaccgagcgacaggaaaagagtacgtcatcagtgcaaaagctgtcattatgaatacgggaggatttagcgcaaaccccgacatggtcgatgcgttgcttgatgagcgatggaggggagagcggaagcgcattggcaccgatcaggacacgggtttgatggtccaggctgcacttgatatcggtgctggaacttataatatcggaatgagtccgaacatcatgcatgtgagcaccgaccattggttgcatcagtatccgatcaatttctacgatgatgtgctggacggccgcacgggcaggtacaagtcgtggacgctcaacaacattccgcttgcatgtggcatttctgccaatgtcgttgcagtcaacaaagagggtaagcgttacatggatgaagcgaaatacgaaagcttcgctgacgatcaggaccatgagtcctggccttgttttgcttcggggaactactattactcgatcgtctccgatgatgtgcttcaggaaatcgcaaccgaaggtttcaacaagatctataagtgggaaggatactgtgcgcaaggggatatcccggccgatatgcccgttcccgaggtgtacgaggggctcggctatgcaattgaagagggcatggcatggaagggtgactccatcgccgatcttgcgggtcagatcgggattgatgtagatgtcctcgaggcgaccgtcgcggagtacaataagctgtgcaaggcgggagaggatactgcattcggaaaagacccccaataccttaccgaatttacatgtggcccttattacgctattcagatattcaatacatcgttctcgacctgcggggggctggatgtcgataccgatattcgggtgctgaaagacgatcacgagactccgatatcaggtttatatgcgatcggagccgactccatgggggttctcttgaaccccaatcgcaactacgtgggttttgggggcgttgctcaaggctggctgtggacgagcggtcgtcttgccggtgccaatgcggctcgctacatcaacgatgagtacggcggatttacgtatgtaagcccggcattggttgatgtggaggcgcagtcatccgctcgatagcggcttggccgaggtggctatgccgtttgaaaagacagtcgtcgacacggtgtagaaatgattatcggcgaccatttgcagtcgccgataatcatccgcccgatccgaaggcctccttttcggaggccttcttacgttcgggggtgtttctcagccaaaatcatagcgaaataatggatattaaatccttattgataatttatatcaataaggagtaagaacctgttaaactgaatcatataagaacagagggcgaccgccttatcagagtcctgcagacgaagcgctgcagcccgaacagaggagagacccatgagggaatcggatgtgcagaatcccgcgccggatactaccaagcttaccaacgaagcaggaaaccctgttgccgacaacaaccatacgctgacggcgggggaacgcggcccgatgatgctccaggacaactggatgatcgaaaagctcgcgcacttcgatcgcgaggtcatccccgaacgccgcatgcatgcgaagggatcaggggccttcggcgtcttcacagtgacgggcgatgtcagcaagtacacgaaggcgaaggtgcttattgcgccgtttttgctacaccgttccacgctccactgctacagcgttccatggcagactgccacgtagcaatgcgggttgctctgattgcgaggggcgcgcaagcgcccctcttggccaatacggccggttatgctcttagccgatgcgcttgcgcattgactcgtcgccttcaatatggatgacgtccgaccgatagactatgcggtcgatgacggcatctgcgattgctccttccccgagctttgaatgccagcctgctggcgagaactgcgagcaaatcaataaggacccgctgcgcaagcgcgcctcgactatctctaaaagctcgcgcgccgccttcccctcgagcttttccaaaagccaatcgtccagtatcagcaagtcgcatttcgtgtagcgcttcttcgccttgagccaatcctcgttcttgctcacgttcagctcgtcgagcatttcgggcaaccggacgtaccttacgctgaagaaggcgttgcaggccgccaccccgagcgcgcaggcaatccagctcttgccggcgcccgacgcgcccgtgatcacgacgttgcggtggcctcttatccatgtgcagttggacagctctatcagtttcgtgcggtcgagcttgcgatccgcgtcgtagcggacatcggcaatgttcgcctcgggatcggagaagccggcctggcgcaacagcctcgtcctcctgttgatgcggcgcgcgtcccattcggcatcgactatcatggcgaacctctcgtcgaaggtcatctctgccactccttgcgattcctcctggtcgcgatacgcttgcgccatcaccgacatcctcatgccatagagtttgtccatcgtcgtctggctcgccgtcattattcatcgtccccctcgctcaagttccggtagtagtcgcctccgcgcagatacgctccggcgttttggtcctcgggccctgcggcccccatctccgagataatcgatttgatcgtcttgtagctcggcctgggcgttagagagcaggccttggcgcacgcctgctcgagcatctcccttccgtgcttcttcgcgagcgccagcaccgcgcggcacgagcggtaggactgctgctcgatcttgcgcgacctcaagatggcatcgacggcttccccgcaggacgggccgatcccggccgcccatttacggaagcgcttcgcgtcccactccacaaagtcgcgatgggaatcgggcatgtggtcggggttggtgcggtagcttcccctagggccgtagatgcgctcgtgcatggcgattcgctcgccgtcgcaggccacccaaacagcggatctggtggcgcatagctccacctcgcgcttgacgtagctgaacggaaccgagtaccagcatccgtcaaacgagacgtggtagttaaaattaacagtgacaaccttgcgggtaaccatctcgtagggcttgcccggcagcgggatgagcagcggcttctcttggcggacgaagacctcatccctgctgccctcgcgcttctggaacggacgggcgttgatctcgcgcaccttctccaaaagagcctcgttcagctgccggagagaggtgaacagctggttgcgaaggggcgcgatggcgcgctgctcgatgaccctcacgctcatctccaccgcccccttgtccctcggcctcctggggcgcgcgggcacgacggcgcacccgtagtactcggccatcctgcggtactgctcgttgatcacgagctcttcgacggtgttcttgacgacgccctgcttgaggttgtcgggaaccactatcggcacgctgccgccgaagaaggcgaaggcgtggacgtgggcctcgacccaggactccgctctcatgttgtaggcgccctcggcgaacatctcgcccgaatagggcaagcacgccacgaagacgtagactttgcgcgcctcgccggtgtcggcgtcgagcacctccatggtgtcgccgacgtagtcgacctgcatctcctgggcgggtttgcgctcgatgcgcatggagaccttgttggcggccgcccaggcgcggtgcttctggcagaaggcggagtacaggtagggttccatgcccgatgccagggcgtcctcgcagtactccctccaaagcgtcagcatggtcatgccgggacggttcatctccttgtcgatgcggggatggtcgatctccgccttcgacatatcggatcgctcctttgccggatagatgacggctcgaatcgccgcatcgttcatctcctccggcaagggccactcgaggccgtgcgccttcgcgcgggtggtcaccgcccttaccgttgcggtggagcacctgcacgagaacgctgtgttcctgacactcacccccatcgccctttgccgaagtatttctctgtacttgaccattttttcttcctttctcgcaatggtccgatgggcacttttgtgcccatcggaattgtggcggaaaaggaagcgcccctttcggggcgcgtggcaatttagattgttagggtgtggcagtctgccatggagcgctgtagcagtggagcgtggaacggtgtagcaaaagcgctgcaatagtcagaaggtgttcgctcccggcgccgaaaccgaggttttcgttcgattctccaccgttgcaggcgaacgcggggccgccgacgcggagcgcgatattcgcggcttcgccattaaattctatacgcctgagggcaactgggatctcgtcggcaacaacacgccggtgttcttcctgcgcgatccgaagaagttcatcgatctcaaccatgtggtcaagcgcgatccccataccaacatgcattcgcctcagagcaactgggacttctggtcgagtttgcccgaggcgcttcatcaggtgacgatcgtcatgagcgatcgcggcatccctgcgagctatcgccatatgcacgggttcggaagccatacgtattcgctcatcaacgagaacaacgaacgcacgtgggtgaagttccacctcaagtgcgagcagggcatcaagaacctcacgaacgaggaggcggctgccctgatcgcgggcgatcgcgaaagccaccagcgcgatctgttcgaagcaatcgagcgcggcgattacccgagatggcggttctgcattcaggttatggacgaacagacggctaagaactacaaggagaatcccttcgatataacgaagacgtggagtcagaaggagtttccccttatcgaggtcggcacgctcgagctgaaccgcaatccgcagaactatttcgccgaagtagagcaggcggcgttcgcaccgacgcatcttgtacctggcatcggcctgtcgcccgataagcttttgcagggccgcctgttcgcctatggcgatgcgcagcgctatcgcttgggcgtgaaccacaaccacattccggtcaacaaaccccggtgcccctatgccgagttccatcgcgacgggcagatgcgcaccgatggcaatttcggcgcgaccataggttacgagccgaattcctacggccagtggcaacaacagcccgaagctgcggagccgccgctcgatctgtttggcccgatggacgcgtgggatcctgccgacgatccgaccgatgatacgttctaccagcccggtgacctgtaccgcctcatgaccgaggacaagcgggcgctgctgatttcgaacacagctgccgatatcgcacctgtaaccgagaacatcaagcttcgccatgccgcccattgctacaaggccgatccggagtacggaacccgtttggccgaagcgctcgggctttcgatcgacgaagtcgttcggcttgcgggcatgtcccatgaagagcgcatggccgcaacgggccagagcgttcccgcgcgtaaagcggggggcgcaaccagctaacgcacgttgcgcgcgtcggctcgtgccggcaaccgtgcaacgacgttttctcatgcggccgaattcgggctccctcggttcggccgccacccaaccgattcgggctctttcttcccgagagccacctttccgaagcccctcgccgatcccttgccgcgaggggctttctcgacttcaggcatcttccgatgcgaccagacgacggcttgaaggatgcgcggggcgcgaaggggcgcggcggaaacggcagccgattcgcttgcggatggttcgttttgatcgagctgcaataagatggcgcgggtctacggggcgccctcggcgacctgcgtgcgatgatgactgttttgtcactgtactttcgctgcttcaactcgtatgctggttatacgagaagaggaggctgccgtgcctaacgatgacaacgatccgattgatcctctgcacccgaaccggatgcagggggcaggggggtacggatatcccgcatacgatccccagcttcctgctgcggtcgacgccgatgcgttggcagatatgcgtgcctacagcagcttacgcgaaaagcgcaagaaggcgaaacggaagaaggccattacgatcgccgttgcgtgcaccgttgcggttcttgcggcagcgggtggcctaacatggtatttctcatcgatggcggccggccccgccgatgatatgcccctgccgactgcgtttgtcgagaaaggaacgttctccgattctgtttcggcttcgggaaagctgaaaccggtttcgtcggtgagcgcaacgcccgaagtcgacggcttggttggcgaagtgctcgtcgccgagggagatgcggtaaccgaaggacagacgctgtatacgatcgtcaacgacgatctcgataaggcgatcgtgcaggcacagcagggcatcgatgaggcgtataacggcgtttctcaagctcagctggctgtcgatgaagcgtatcgatccaaacaggcaggcatcaacgccgccgctgccgcatcgcaagccgctgaggcggcaggagaatccgaggcgggggcgcctgctttcgacgttgcgcaggccgattcggccatcagacaggcggagctttcgcttgcaagcgcccagacggctctgtcgaatgcgcaatcggcctacgacgatgcggttgcgagggccgagaagcgtacggttacggcggccatcgacggcagcgtggtctcggtgaacatcgagccaggaaaggcgctggccaacgcgtcgggctcggcatcgcctatgcagatagccgatctttcgcagatgaccgtttcggttgaagtcaacgagatcgacatcctcaaggtcgaggcggggcaagatgccgtcctcacgttctcggctattcccgatcttgagcttgttggcacggtgagtcatattgccacggtggacaccggatcggccgacggcgcgaacatgggttacggcggaacggtaacttacaaagtcgatctgcttatcgagcagcctgatcctcggctgaagcctggcatgacggccaaggcctcgatcgaatcccaaaaaattgaaaatacgctgatggttcccgtgtcggctgtgcagaccacctcggcaaacgaggggttcgtgtacgtggtcgatcccgaggatccgactaacatgcaggaacgcgccattgaaatcgtcgcctcgaacggactgaccatggctgtgaagggatccatcgccgagggcgacgagatcatgcttgtcggcgacagcggaggcgcttcgatgggtatggggatgggcgcggcgggttcgtcggcttctgccgatgttgccgttgaaacggttgcggggtagacgccatggctctggttctcgaagcgcgcgacgttcacaagatatacgagggcgcttcgggattgacccatgcgctgcgaggcgtttcgttctcggttcggcagggagagtttttggccatcatgggaccttccggctcgggtaaatcgacgctcatgaacatcctcggatgccttgatacgccgacgacgggctcgtatctgctcgagggaatcgatgttgcggcctataacgaagacgagcttgccgaaatacgtgcaacgcgcatcgggttcgtgttccaatcgttcaacctgctgccgcgttcgaccgtattgagaaacgccatgatgccgctcatgtacacggcctgtcccaaaaaggagcgtgcagagcgcgctcgcagcgctctgcgcagcgtctacctgaacgaagatcttttcgatcatcgcagcaacgagctttccggcggccagatgcagcgcgtggccattgctcgcgcccttgtgaacgacccggccttgatcctggcagacgagcccacgggcaatctcgatacggcaacgggcgaaatggtgcttgcgacgttcaagagcctgcgcgaccaggggaaaactatcgtgctcataacgcacgagcccgatgttgccgcccacgccgatcgcatcatccacattcgcgacggcaagctggccgagcgcgacggcttcgagcaggggggcgcacgatgaagctcggggaccttctatacgaaacctggtatgcgcttgccgcgaacaagggtcggtcgtttctcaccatcctcggcatcgtcatcggcatttcggcggtgatcgcgatgacctcgctcataggcggcatccagaacacgctcatgggcgagctcggattcgcacaagcccgtcaggtcgcgatcagcgtgaattctccgcgtgaaatcacgttcgacgatcttgacgcgctcgagcagatgatgcccgattacgagttcatcacgggctcgacccaaatcggaacgacggtcggcacggcgacgaccaccgttgagaattcgacggtttactgcgtgaagcccgagtacttcgtcgccaacggatcgacgcttgcggcgggcaggttcttcaccgaaagcgaggagaaaagcggcgcgcgctacgtgctgatcgaccagaattccatcaaagaggtgttcggcagcgccgaagcgcaggcaatcggccagaccatccgcctcggcaacgacgattaccaggttatcggcgtgctgcaatcctcgacgctcatgtcgtacggcactacgatctacgttccgttctcaacggccgtgcagcgcttgggtgccatggggggctatatgcagatcaccggtttcgtgcgcgagggtgccgatatcgaaacggtcgttgctgcgaccacatcgacggtggcgcgctatttcgggctttcgggcgaagaggacgtgtacgtgttctcgttcgattcgatcatcaaggagatggaaacgaccatggcgtctttctcgttgctcatggggtcggtggcatcgatctccctgttcgtcggcggcgtgggcatcatgaacatgatgctgaccaacgtgacggagcgcatacgcgagatcggcctgcgcaaatcgcttggagcgcgcagacgcgacatcacgaagcagttcttgctcgaggccatcatgctctgcgtgatcggcggtgtgatcggcatcgtcatcggactgctgggcgcatgggggctcggtgcggtggtgggtgccatgcaaccgggcatgacggtcgtgcccgccgtctcgcttcccgtgattttgggcgccgtgggggtttgcgtgctcatcggcatcgtgttcggatactatcccgcgcgccgcgccgccaagctcgatccggtggagtcgcttcgctaccagtagggtgtcgtgcgcattggagcgcaccgggacgtttcgggcgcccttcgttcgggtgcgcggaatgtggtatcgtgcttcgcgggtctgttcgaaagacgacgattcggaggcatcgtgaagtttatcgtggcaccggcgaagaagatgaacgtcgctgacgatgtgtttgcgtggaaggatcttccccggttcgtcagccgcgccgaagagctgatgcatgccattcgggagctgtcctacgacgaggcgcaaaagctctggaaaacaagcgatgccctgacgagccttaactacgatcgcttccgtacgatggatgtgcgggggaaggcctgcgcgctttctccggccgtgttctcctacgagggcattcagtaccagcacctggcgccctgcgtcatggaggaatcgcagttggcttacgtgcaggagcatctgcgcatcctttcgggattctacggtatcctgcggccgttcgacggcgtggtgccgtaccgacttgaaatgcaggccaagctttcggtgggggattcgtccgatgtgtacggcttttggggcgacgagctggctcgcgcgcttgcggaagagaccgattcgcttgtgaatctcgcgtcggtcgagtatgccaaggcggtgctcccctatgccggatcgcttggcgtgaaggcggtaacgtgcctgttcggccgcgtgcgcgaagacggcagccttttgcagcgggcgacggcagcgaaggccgcacgcggttcgatggttcgctggtgcgctgaaaacgaaatcgcaacgctgggagatctgcgtgcgttcgatgtggcgggctatcggtaccgtcccgatctttccgatgagaatacgtttattttcgaggaaagcagaagatagtccgacagtttcgacggctggttcgtatacgtagcagcaatgacggctgagcaacgcgatctctctgttcggcggctcatcgctatactgcaaagacgacgccggcatggcatgggaggcgatgcggcgcggaagcggaaggctccgatggggccgacctgtgttcgaagggagcatgcgaatgaaacgacgtttactcgtgctgggggcgattgcctgcgttgccggcgcgcttatgctggctgcctgcgcggggggcgggcaaaacggacagggcgaagcgccatccggcggggttccttcttcggaggcggatgcgcacgccgttgcagtgccgacgtttcccgagacgcccgatgaagatgatggcgaggcatggctgaacacgctcgacgagaatccgatcgatcccgcgttcgtcgaatcgctttccgggttctcgtacaaaaccgcctcggtggtgctggggaaggaaacggagaacagcacgtattcgcccatcagcctgtactatgcgctcgcccttgccacgcagggggcggcgggacagaccgccgatgagatgaacgcggttttgggcgctcccgacccgtcggcggtgccgaccgagctgggcaacctgttccgcgtgctgtacggcgatccgttttcgaaaatcgatctcgccaattccatttggatgcgcgagggcgacgagttcgagcagggcttcatcgacgttgctacgcgtcagttctatgcgacgccgttttcggtcgagttcggtacggccgatgccgatgccgcaatcgccaactggatcgccgcgaacacgaacggcacgatcgagcccgaggtgaatacaacgagcgatcagctgctttcgattatcaacaccgtgtatttcaagggcagctggtcgaaccagttcgacgcgtcaaacaccaaagaagacgtgttccacggcatgcaaggcgatgcggctgccgagttcatggtgcagcggatcgacaagccgcgcgagttcgtgcagaccgacacctacacgcgtgcgagccttgatttcgtcgggggagcgaccatgtcgttcgtgcttcccgccgaaggggtgagcacaaccgacatccttgccgatgggcagctgctcgaagacgcgtttacctccgaagccgacgaatccggatacatcacctacacagtgcccaagataacgttcgatgcctctttcgatttgattgcgccgctcgaagaactcggcatgaaaacgccgttttccgatgaggcggatttctcgaacctcacttcgacgcccgcttacatttcccatatcaagcaggagagctacatcatgtgggatgaaaacggcgcggaggcgagcgcgtataccgatatcggcatttcggagatgtccgctgcgcccgataacctcaaggagatcgatttcacgctcgatcgcccgttcctgttcgagatccgctcgtcccagggcgtcccgctcttcattggcgtgtgcgagaaccctgcagcaagcgcatagcgccggcgcgcaacggcgcgttgcatctcggcaacaaaagaggcatgcgcgcaaagcgcgacgcataataagcagcagcccccgagcggggctgcttgcattcaagcggtttcgaggcggtttgaggtagagacatgcttctgaaccaagcgaacccgccgagcgttgacgtctcgaacgggttcgtgcatgtgcggtatggtgcccgaggcgagagtcgaactcgcacgtctttcgacaacggtttttgagaccgccgcgtctgccattccgccactcgggcgcaagcagagattatagcggaagcgcgagctgccgccaagaagaatcgaggtctgcatggtttattccttgcgatgtgcagacaaatgcgacaggaggtcggcatggagcatgaagagctgggcgccaaaatcgatgcgtatatcgatgaggtttgggaacaggtcgtcgaggacatcgacacgctggtgcgcatcccgagcaccgaggatttggacagcgccgcaccaggcgcaccgtatggccccggtcctgccgaggcgttgaaagcgggcgtcgcgctcgccgaaaagctcggttacgatgcgacgaacatggatgggcacattgcctttgccgatcttcccggcaagagcgatacccagatcggcatcatcggccatcttgacgttgtgcccgccggttcgggctggaacttcgagccgttccaggtaacgcgcaaagacggctacctgatcggtcgcggcgttctcgatgacaaaggcccgagcgtcgttgccatgtacgccatgcacttctttccgaagcacgggatcgagctgccctatacgatccgcatgatcatgggcggcaacgaggaaagcggcatgcgcgacgtcgcgtactatcgcgagcacgtcgccgatcccgctttcgtgttcacgcccgatgccgatttccccgtgtgctacggcgagaaaggcgggttcgacggccgctttgaaagcatgccgatgggcggcgacgccatgatcgtcgatttcgggggaggaaacgcgaccaacgcggttccctctgaagcctatgccatcgtgaaggccgatccctcaaagcttgccggcaccgatcgcatcaccgtatccgatgcgaacggcaatgcccgactcgacgcccaaggcatcggcgggcatgcctccaagcccgaaggcacgatcaatgcgatcgggctcattgtcgattacctgctcgagcacgatctctgctccgaagacgagcgggcgtttttgcagctgcagcacgatctgctttccgcatccgacggaagcggcgtgggcgtgaagacctccgacgagcacttcggaccgctcacgcttatcggcggcacggttgagaaggacggcgaccgcatcgttcagacgatcgacattcgctatcccacttcgatcacctccgacgagcttatcgaaaagctcggttcgcgcgcgagggaaatcggcgctgagttcgacaacacgcttctgatggtaccgttcttggtggaacccgattcgccgatgatccaggcgctgctcgattccttcaacgacgcgaccggcatgcacgaaaagccgtttacgatcggcggcggcacctacgctcgcgaattcacttcaggcgcgagcttcgggccgaacatgccttggctcgatcatcccgattggattgcaggcgagcacagtgcaaacgaaggcgtgagcgaggatatgctcaaaacggcgctcaagatctacattctcacgatagacaggctcatgaagcttgatttttgatagtgtgctttagtacgcgccgggtcggccgggatttgccggctgtctcggcgcgtgttttgctttgtaccgatggcgcaggttgtttgcagtgcaaacggcgctgccgtaacgagaagggactgccgatggaccggataccgacgatggaaggcatcgagttcgaagaagacgctttgcccgatggggcgctcgtcgatgatgacggccatatcgagctcgagggcctttcgaacacacgcgatcttggcggaatgaaaacccaagatggtcgggcgatcaggcgcaagatgctcatacgttcgggagcccttgccaatgcgaccgaacatgatgccgccgccctcatcgacgagtatcggcttgcgaaggtcatcgacctgaggaccgaggaagagcgcctcaagagccctgatcccgaagacctgttcgaaggcgtcgagtttctcgatattccgattctcaatacccaggcgctcggcatcacgcgagagggcggtgtcaaagggctgctcaaggcaatgaaggcgatcgattccgatccggctgggctgatgatcgagatctatccgagcatgctgctcgatgagacgagcgctcgcgggtacgcgcggtttttcgacgagctccttaagggcgagccatccgttggcggcgattctgtcgaaggcgacgatgcgggcgcgcgtccaggttcggtgctgtggcattgttcggcggggaaagaccgagccggccttgcggctgttctgctgctccacgtgctcggcgtgtcccgcgaactgatcgtcgccgattaccttgcaaccaacaagtacatggagtcgcgcacccaagagatcctcgactcgctttcttcgtacggtttggcgggcaagctcgatgaaggcgtgcgcgtgctcaattcggccgacgagcgctttctgcaagcggcgctttcggcggtcgaagagcgctacgggagccttgacgcgtatctgagcgaagcgcttggcatcacccccgagaaagcggaagcgctgcggacaaggtttctcgaagggtagcatctgcttcgatctcgtctatcttctcgacgagaggttgcgacagctcgttgtcggcgagcacccatacgcgatcgcccgatgagaagcgggtgttgcggctgggctttatcttcacgagcgcattgtgctcgatggcgattacaagcgaaccataggtgcccctgaggtcaaccgaggcgatggttcgccccctgaattccgaggctgcggggccgatggcgaacgagaggcaggacgcgtcgattttcgcctttccgcttgcgaggtaatcgtcgagcgtgatgctcgcggcttcggcttcatcgtcgatcagatcttccttgagcagcttttgaagataggcgtcaacttcatcctctgcgcccaagaaggtcagaaggtctccttttcgaataccgagttcgtcgttcggatcgctgatccgtcggcgcaagtcttcctttgtgagcgtgggaaggtctttcgatccgaccatcttgccatcgcgctcgatggcgatgagatcgaggttgtatgcgagtccgaacaggtagtcggcagagcgctcggttcctcctcgcatgagcgttttggtcgtttcgacttccacgacatagagttggcgttccacccacgaagcccgttcttcgtcatccagctcagcctggcgttcggcgaggatgctttcgttgagatttccgatgaagctcgcttcaagcttgaggaaccccgaatggattcgctgggagcgggcgaggacgaacgtcagggcgaaagcgagcacgaagaaaaggggcgtgcgcgctcccccgagcagaaagacgatgtacatcaccatgccgcatgagacgatgatcccgatcacagcgagagcgagcaggggagcatggttctttttgctctcgacccaaagaatccagaattctcctttccgtccgctgtaaaacaggttcgacatgaagatgcccgttatgagaatgccgattgcagacaagccgatgctcaacgcgggttcgagaacgaatcccgaaagcatcggcttcgccacgttggagagaagctcgcccgacgccacagcggcgatcacgactagagccaccttcatgccccatcgcttgaggtagtcgatccagacgttgccgtccttctcgtcggccgctttttcctcccgcctctcaagccgatcgagcaacgtttgcggcaatacgcgcacaagcagacggtagaccctctcggagttcttgatataaaacggcgtggtgagcgttgtgatgaccgataccgctacgatgacgggataaaggaaatcagccgtaacgccgagcgatacgccgagggcggcgatgatgaacgagaactcgccgatctgcgagaggctcaaccccgtcttggtggacgttttgagcgattgccccgacagcagtgcgccaagcccgctgaagatcggttttccgatgagcgtcacgagcgtgatggcgatgatggggccgatgttctggacgatcatcgccggcgagacgagcatgccgaccgaaacgaagaacacggcgccgaacagatctttgatcggtttgaacagctcttcgatgcggtgcgcacgcacggttcccgcaaggatggagccggcgagaaacgcgccgagggcagccgagaatccgatggcgttggcgagcacgaccatgcacaggcaaagcgctatcgatacgatgagcaggatctcgtcgttgagcgcttgggcaactttcttgagaacggttggaacgatgatgatgctcaaaacgaaccagacgatcaggtagagggccatctggctgattttgagggcgacttcgccgccatcgacagccgagccgacggcgatggtcgaaaggaataccatgaggaagattcccacgatgtcctcgatgacaagcgcgccgaatacaagttcggtgaatttcttccctttgagtccgagctcgtcgaacgccttcacgatgatggtggtcgaggagattgcgagcatgccgccgaggaaaaggctcgtatagaacgaccagccgagcagggttccgcatgccacgcctgctgcgatcatgagggccatttcaacgagggcggtgatgatcgccggcttgcccaccgttgaaagtttgacgatgctgaattcgagtccaaggccgaacatgaggaagatcacgccgatttccgaccaggttgagatgttttcggtgtcggatatgttgggaagccagcctatggcggggctgatgaggaagcccgcgataacgtagccgagtacgaggggctgtttgagtttcttgcagacgatggtgaccacagcggccacggtcagaagcagtgcgaggtcggcgacgagttgggggatatgctccatgcgggttccttcggttcgaatttcgattacggtttgcgattgcgtgctgctgtgctgggggattcgcttacggcgacagcggctgcggcggtcgacgcggcgcttgccgcggccgattgcccggatgcgtctggtgcttgctcggcaaggaggcttgccgcctcgctcgtatcgtcggtgcggacggcgcgagcgagcttccgcaaaatgcgtatgagcgtttcggcgtcgtcgcgcccgagtgcttcgagtaccgaaaccgcgcgttttttcatgtgcgccgacagatcggtcgcatagacgtggccttcttcggtgagcgtgatgacggcttttctgcggttcgaggggacgaccgtccgatcgataaggcttttctcctcaaggcgacgcaagatgtttgccatgcgtcccgttgtgatccccatggcttggctcatttcgcctgctgaaagccctgaatcggacttgagcagcaggagcatggcatggccttctccatggttgagcagatcgaacgcttcgctctgcgaggccatcgtcttcagcgcctcgagccaatcgggtatgaggtcggcgaagcggttttcgagttcggtttctgaatccatgttgtttcctgaaatcttctagtaaaagctttcactaaaagatatcaaaaaggagacatgtatcgccgagagatcacaaaacatgcacaagcggtttccaggccaagcccaatgagagctcgggttgggtaggggttgagattgggcctcggcgaggatccgggttgctcgaaggccccgggcggccccgacggcaccgatggcccccgggttgcccggagaccccagtggcggcagacggagctcaaattgcacaaaaatcgccagattactacatcgttcgggttcgaaagcgctccgaaactctgggtatcggttgaagagaagctgtttccccagttcacgccaattgcctggaattgttcagcatggaacggcgtgcgggcatgtatgaatctggcaaaaaacgagcaaaatcatcgatcgggggttcccgtcggcgtccgggtgacgagcgtgccgcggccgggcgggggttcccatcggcgagcgtgcggcggccgggcgggggttcccatcggcgagcgtgcggcggccgatcgaaggttcccgtcgacgttcgggcggcaagtgcgcggcggtcgatcgaaaaacgctcgaaaccctcaccgacaattcggcacgcttgttgacaaaattggtatcgtcatacttttttgggagaaagccagtatcatgacgggaacttttttgacaaatttactatggattacgatgggggcacgcgatgagcgatgaaaagacgcaatccgttgatcggctggcagacccgagcgcgctcggcttgttcgggctggcggttatcacactggtggcatgcacgcagaagttcggcataaccgacggggtgacgggagtgatgagctgggcgatattcctcggggggtgcatgcaactcatcgcaggggtcttcgatttcaagaagaacaacgtgttcggaggcacggcgtttatcgcctacgggttcttctggtgcgcaatggcgttttcgtgggcggtggcgagcgggatattcggggagcaagcggctgcggcgttcgatccgaagcagacgggcgtggcgtttctcgcgtacctgattctgacggcgttcatgacgatcggagcgctgcgcacgacgaaggtgctgttcctcattttccttgcaatcgatttcctgttcatcggcctcgcgttgagttcgttcggcattgctgcggaagccacccatatgctcgctgcggtaagcgagctcgtcatctcgcttctgagcttctacggtgcgggcgcaaacgtgctcaaccgtcatttcggcgaggaattccttccgctgggaaaagcgttctgggctaaaggataggcatcccgtcccaatcgcgcgctcgcggcgatcggctccgaggaaccctcgcagccggcgttagtcgcgctcggcgtcgttgggcggattgccgccggcatgcgattcgatgaagtcgagcagctcttggcgattatggacgtcgagcttgcggtagatgtggttgacatgagtcgccacggtgctgttggctacgacgagctttctggcaatgtaggccacagttctgcctaccttgagaagctcgagcacttcgagctctcggtctgaaagaccgtaggcttcggcgattgtgcgaagggattcggcatcggcaggcttcccgtcaggcgtttcggaggatgagcttgcttggtcggggaagttttggtgtcccttcataacgctgaacgccgaggcggcaagaagcaggagaaggacgaacagagaaatcgaaagcgattggtcggacgttatgccgtgccatgacccgatggcgaaaccgcaaagcgcacccaagcaggcgatgcccctgccgaagctgaaaaccctgtatggggatgaagacggctgtttggctatatgggcaaccatgatccacgttacgatatcgacgcatcgaacgcccgcgctgataagcgcgagttcgagcgattggttgtttgacccgaatagcgagagcacgaagattcccagcgtgatgaacggcagtgcgatcgtcattgctatgccgagataagattcttttcgcaatgcaacgaccagcatgagcgttgccgccatggggatgaggctcacgattgccatgtagtagaaagagctgaagcttgcggcggctgcggaaggcaggaagagcatcctgaataccccgaacgaagcgccgaagagcaccatcaggacgacgaggtttgcgggaagcggaatgccccgtttcgtcttgacggcaggctggctgcgcggtttctcgtcgcttgtttccgaatcgctcttgatgaggaggagacccgaaacaagcggaaggagcgctacgagccaaacgctgatcggtcctttatcgagtatgagaaacgatacaaggagggcgaatgtgaacgaagacgccgacactatcccgattgcagctccggatagtttggtgaaataacatgtgccccagaatatctgcagaagcgatagcgaaatgccgattgccacaccggccgttaccagcgcgaaatcgggcgagatgccgaggtattcaaggttggatattgctgccgtgcagagagcgagggcgcatgccgaggcgaggattgccgtgcgcctcgttcgctttcgcggggttctccgtatgctgaacgaaagggagaaggatagtatcgcgcccgataaaacggaggcgagattgaggctcgacgtgggaatttggaggctggtgagctctccggagaacagcaggggactgttgagcgctgccagaagccaagcccaccagcagccgaacccgataatccccagcggattctttgcgatgttcgatgcgatcacggatctattggtgctcaatgaggtttcgactcccttgccattggaatagcaccattatagcccttgggccgacaggacgtttgcctgggcggcccaagggaggtcgggatcgtttacacgagcgtatccgaagcgagagctttgccgaccagccagccaaaggtcatgcctcggccatggctgattccggaaaagatcatcggataggagtccgtgaagaagttgccttgaacgtttccgatcgcgtagagtccctcgatcggcttgtcgtcgccgtcgcagaccctgctgtggctgtcgacgttcacgccaaacggaacaaccagcacggctacctttatcttcgaggcgtaaaacggtggcgtttcgacggtggtgaggtagttcgagggcttgccgaattgagtatccgttccgctttcgcacagaccgttgtattcgtcgacagttttaaggaaagcgtccccatcggcctcgatttgcctcgctaaatcctcaagcgtgtctgccttgaagaacaccttctcttcgattcctttcgtcatccaatcctcgaggccttcgtatccctcgttaacgccgtacaggtcgccgaggtattcgatgccgtttctgttggcgccatccggagcatgcgagagaagcttcgtcgcgtagtcgttgtcgaagatcgaataacccgccgattcgggctgctgcatggtcgaaaagcagatggacggcccccctgagttttctgcaaaataccgctcaccatgcttgttgaccgcgagccagccgagtacgccatcgcttgcgagcggtccgccgcttgctttcgtggatggcagcgccatggctgccgcagtggttttttgcagcgcaccgccaacccagcatgccatgttgattccatcgcccgtgtttcctccgaagggggtgtaaagcctgttttcgcacgaagcgacaaggggagcgaattcctgcatcatctcatcgtttcccgagatgtcccccgttgcgagcaccacgccttttgcagcattgatttggatgtatccatccgccgtagaggcgaccactccggttacgggtccttcttcgtttcgaatgagctgctcggctttcgtgctgtacctgatgtcggcgccttcgtctttcgcccaggtctcgatgaaccggaggagtcgatgctgaatgccttcgccgtcttcggttacctgcgtggcgccgaagtcgatcgagacggggtattcgcggatgcagacgttgtccgaatccatattcgagcctttgttcgtcgctatgtcggttacgccttcggccgccatgcgctctatgtagtaatccatgggctcggcgctgtggttgagccatgtattgagcaggctgacgttcgtgcggcagccggtcagctgcagccagtcccgttgcattctggctgtgtcgaacgaaagtcccagatctttctggtgagcacagccgacggctccgttgtcatgccctcgtgcggagaacgtgtccatcttctcgataagcaccgtctcagctccgttcatggcggcggagtgggcgcatacgagcccggcgataccggctccgataacgacgacgtcgcaatcaagcgtctctttgatctggtcgctggggatgggatcgggcgtctgctcccaagaccttttaggcggctccgaaccggccggctgggtctgatcgcccgcgctcgggccggtgcagcccgaaaggccgaccgaggtggctgccaaagccgaagctgccgcaattcccagaaagcttcttctatccaacgtatgttttgcttccatgactgatccctcctagatcgttgcaaaccgcatatgcggaaaactcgataggatcttatgctttcgtgcagaattgcgaatccttcataaccgttgaaagagggaaggggatcgaatttcggcatccattgttttcgtggatacgccggattttgaccgaagactagctcttgcggattcgaaaagcgaagcgaatcgttcagatagctccgagcgtagttctcagggagttttgcgaggtgcgtttaaccgcgctatctgaaccggagccgtcttcacagcatgccatgaagcgctcgaacggggcctgctcccgatcggtggtaggattcgaggcatatccccagacatggcaggtggcgtttctgaaggaacctggggcgcggccagcgctcgccccaggttcctcgagctctaggaaggcagttcgctttcgaggtacgatttcatcgaatactgcgtgacgtccgaacggttgatgacgccgacgatttgcccgtcgtcgagcacgggcacctttttgagatggttttcgccgagcacgcggcagacttcgggcaaatcggcgtggatgtcgacaccgatgattcccttggcgccgatgtccttcgcacgcatctgcataagttcgcgcagcttgtcatcgaagccggtgctgtcgcgtcccatctgcatgatcatgaccacgggatcaacgtacatctggctgcgctttgagagatggcgcatgatatcgccgtctgaaacgaagccgaccgcattgcctgcggtatcgacgagcggcgccgcgctgatgtgcttgtcgacgagcaggcgcattgcatcgatgacggtcgcgtcggcgtcgagcacgtaaacatcgcgcttcatgatgctctcgagcacggtgcggcgtgcgttgtcgacgtcggtcttggcggtttcgccgggcttgtccttcacgaacgcgatcgtgaggccaagacccagcacgcaaaggacgccggctgcggcgaacgccatgttgatgccgaagatgctcgcatgcacggtatccatcgttgcgccgccggcattggtggctatcgtcatgatggatacgagtacggcggtgccgagcgaacccgccacttgccggaacgtgttgttgaccgaggtgccgtggttgatgagcgtgttgtcgagcgcgttcatggcccaggtggtgatgggcatgttgacgagtgcgagcgagaacaggcggatggtgtagaggatggtcaggtagacgatccccgtgttgtcgccgagaaacgccatggcaaacgtggttatcgtgagcatcgataggccgatgaggctcagcacgcgcggcccgtgcttgtcgaacaggcgaccggcgatcggtcccatggcgcccatgacgatcgcgccgggaaggatgacgaggcccgaaatggtcgccgaatagccgagcagcgattgcaggtagatgggcagcaggatgcccgcagccagaagcgatgcctgcacgagcatgccgatgatggtgccgatgagaaatttgcggttggcgagtacgcgcacctgcagcatcggcgtctccatcttcagctggcggcggaagaagtagataagcgatacgatgccgatgacggtagcggcggcggcctgcacgctgatgccgtacgagccgatcacgctgaatccgtagagcaggcatccgaagccgagcgaagatgaaacgacagagggcttgtcgagcgaggtttgcttgtcgggcgcaggcgtgcgttcgagcacgaacagcgagcatatgatgacgagagccgaaagccctgcgatgatgaaaaacatgtcatgccagctcgcgttgtcgatgataaggccggcgacggtcggcccgatggcgggcgcgaaagcgatgaccacgccgaacagccccattgcgcttccgcgcttatcgacggggaaggtgagcatgagcacggtcatgaccatcggcatgaggatgcccgcacccgccgcctgcagaaggcggcctgcgagcagcacgggaaacgacgggccccagccggcgagcaggctgcctgcggtgaaaatgcccatggcgaccacgaacaggttgcgggttgaatagcggtcggtcagatatgccgtgatggggatcatgatggcgttgacgagtgtgaagcccgtcgtaagccactgcgcggtggcggcatcgacgctcatctccgccatgacggaaggcagcgccggcgtgacgacggtttgattgagaacggtgacgaaggtgccgaacatcaatacggccaacatcataatctgcttacggcttagtcccatacgtgctccttagtgctttgctgagtgcgagggcgatcttcggccataagaaaaggcgcttgcgcgcccggtgccggtaatcccccgtacaacctgtatccatttctgtgcaaccatttaatactacgctgcaaataatgtgagcatgtgaattaggtatggttgttttggggtgaagacgattgcgttcgtctgaacaatgcttatcataaaacattaagaacttaccaatcaagcagcatgcgttttcggcgcgaccggcgtgcaggcggtcctcgtcggttttgaggagggtgcgacaatgcgggtatgtgttggctatagcgatttgcctgacagccatgcggcgggatgcgaggcggcgctcgcctctaaggccgatgccgggcggcgggagccatgcgatatggtgcttgtgttctgcaccgttcggcatcgcgtggaaacgttgagggaagcggttgcatcggtcgtgggcgacggcgttccgatttacggcggcggctctgcggggatcatcaccaacgagcggttcggctatgcgggaaaccaggtcggtgtggcatgcgtgtggctcgacgatgcccgctgcgaggtctgcgcggtacccgatttggcgcagggggagcggcaggcgggtgcacggttgggtgatcggttgcgcgaggcgggaatcggtgccgacgattcgatcgtgcttttctacgatgccgtcgacgattcggggcccgagaagcgtctgctcatggcaacgtggattatcgaggggatgcgcgagcagcttggctttcttccccatatggcgggggcggggcttctgggcgatcatgtatgcaacccggtcacgcagctgctcggtttcgaaacgggacggtcccatgcgctcgcattctctttctcgaacgacattcgcatcgatgcgaccatcatgcacggttgccgtcctgcttcggaatgctatacggtgacgaagtccgacggcccgacgatactcgagatcgacggcgtggcggcgctcgatttcatggacgggcttttgggtccggggctcgccgtcgagcaatacccgcttttcctgttgttcggcgtgaaccacggcgaaagctggacttccttcggcgaagcggattacgcgagccggatgtgcttcggcatcgatcggcgtcggcgcggcatcgtgatgttcgagcccgatatggttgccggtacgcggttccagataatgcgcaggtcgcttgagctcgattacgtgaaaccgaaaatcgacgaggcgttcgacaacctcgatggctgcgagccggtattcgccctgtacctcaactgcgcaggacggtgcgcgggttacgggggcaccgatatggaagacgcccttgcagttcaggaggccctgcgtggccgcgcgccgctgctcggcctgtatacgggcgtcgagatcgctccgctcggcggcgagccgcggggcctcgattggacgggtgtgttctgcctgttctcgaaacgcacgggacaatcgggtgaaaagcggcggtccgatgtggcgcgcatgtcttccgttcagggtttttcgcaggggcccgaagagattttgtcccatgacgcgctgaggttgctgtgcgagcaaaacgtcgcaaagatactgcagctcgatgcccaatccatcgtagtgcgctacgaactcgagcgcaagcggcgcggttttctcctgctgtccgaactgatggccttgctgcgggaagaggagtgcgacgaagacgtcatcgcaaccgtcgcacagcgcatcaacgctgcgctgaacatgcagaagacggtcgttctcgagcccgcggcagatggggttttcgagccgatcgtgctgcagggctattcggacgtcgagcgagcggcgcttgcgggggcgtcgataacgcttcccgatgagatggcgtcgatcgaacgctcggtgctcgtcaacgaaggcgaagggagcgagcgcttctccgacatctgccgaacattgcggcttccctcgttcgtctcggctcccatcacgcaagacggcgcgctggcctacgtgctcgtagtggggcgaacggtcgtgcagccgccgttcttctctccgttgagtgcgggtgacgaggaaacgatccaggtcgtagccgcactcgtttcatcgtttttgctgaggcgcagcctggaggaggcagaggatcgagcgctcgccatgatggatgcgacgcccctgtgcgcgaatttctgggacgaggatttcaacaacatagattgcaacgccgaagcggtgaacctgttcgatttgacgtgcaaacaggagtacctcgatcggttcgacgagctgtcgcctgaattccaaccaagcggcgagcggtctgcaattgcagcgaagcgaatggtgcgcaaggcgttcgaggaagggcgttgcacgttcgaatggatgcatcagaaacttaacggtgaaaagataccggccgagatcacgctcgtgaaagtgcgctacaaaagcagcgatgtgatcatcgggtacacgcgagatctgcgtgaaatcaaagcaacgatagcccagatcgagaaaacgcaggacgagctgcgcgaagcgcgggatcgtgccgaagagaactcgcaggcgaaaacgaactttctggcgaacatgtcacacgagatacgcacgcccatgaacgcgatcatcggcatgaccgaaatcgcgaagacgagcaaggacggtgaaaccacccgccactgcctcgatacgatttccgacgcgtcgaaccacctgctcggggtgatcaacgacatcctcgacatgtcgaagatcgattctggaaaattcacgttggccgaatctgatttcacggttaagcatctgatcgatcgggcgatcggcgtcataagcttcaaggtgttcgagcggcggcagctcttatcgatcgaggtggatcccgcagtgccgacggcgatcgtggccgatgagcagcggcttgcccaagtgataacgaacctgttgtccaatgcggtgaaattcacgcccgaagaggggcacgtcgatctttcggtgcgcttgatcgaaggcggtttcgacgcgtgcgttctcggattcagcgtgcgcgatacggggatcggcatatcgtccgaacagcaggcgcagctattcgaatcgttcgagcaggccgatgcgagcatctcgcggcgtttcgggggaaccgggctcgggctagccatatccaaagacatcgtcgaaatgatgggcgggcgcatttgggtcgattctgcgctcggacaaggatcggatttccagttcaccgttcgggtgggcgtgggggctgctcggccagcagacgattccgggtcttcccgcaaaggggagcctaaccgagcgctttcgcgcgacggggcctttgcgggcaagcgcatcttgatggtcgaggatatcgccatcaaccgcgagatcgtcatcaccctgctgtccgatactgcagtctctatcgacagcgcggaaaacggccgcgaggcgctcgatctggttgcagccgatcccggtgcgtatgacgccatcctcatggatatccatatgccagaaatggacggataccaggccgcccgggctattcgggcgctcgatgctcccgaggcgaaggccgttcccatcatcgccatgaccgccaacgtgttccgcgaggatatcgagcggtgccttgcggcgggcatggacgatcatctgggcaagccgatcgacatcgacgatttgatggcgatgatgcgaaagcacctcgcgaaaggatagcgtcccgaatcgttgcagggcgctcgatctgttgcggcgaataagccgcattgcgcctgtcgcctgccttttcacggcgttcagccgcatgcgggcgaaatcttcggcttcgatgcgcccttcgtggcatgcggcgcaggcggcgcaccgggttgcgctggtctgccgtcaaacaagtaacatattatgtaaatactatgagcatcccaaaaacaatagtaaaacactatggtttaaggtatatctatcacagtttatgtaatgaattataaattttacgattttctaccattttggtgacagatagattcaccgcccgggaactatacctatagagcgcgcgtaaagtttcgcgctcgggcatcgaagaacggactagggaatgcacatgggtgagaagaaggcgcgtcaggccgacgtgcgaaaacttgttggtcgagcaaggcgaggcgatgggagggctttcgaagcgctcatcgattcatgccgctcgaagatcttgtatctggcgcttcactacgcgcgcaacgccgatgatgcggaggattgcgctcaggaagcggtcctcaaagtgtatcggggaatagggaagctcaaagatgtcgatgcgttcgattcctggcttcacagcatcgtcaagtacacgtgctatcggagaaacggcaccatggagaagaacacgatactgctcggcggtgattctggagcacgcgacgccattatgtcgatcgaagaggcgcgcaccgaatttcttcctgccgaatatgccgaagacgccgaaaagcgctcgttcatcatggggctcatcaaagagctcaacgagaattaccaagaagcgctgcttttgttttacttcgaaggattttcgtacaaggagatcgctgcgacgctcggcgtaaatgcgaacaaagtgacgaacgacctgaagcgcgctcggcaggctctgagaaagaaaatagaggaaaccgacggtcgagttcttgcatcggcggcgattcctgcgggggctctgcccactctgacgcgcatttacgagctggattgcctggaagccgtcactcccgacatggaagagcggctgactgagtacgccgctacgatctgcgccgccacggttgccgcaggcgctgggggcgcggctgctcttgggcagggtttgggagcgaagctggcgatcgggggtgcctcggctttgcttgttgccggaatcgctgcgggggttgttgcgtcgggcgacgcggtggaatcggctgccgatcagccggcacccgctcgatccgtatccgaagagcctgccgagcctcccgaaccgcatctcgcgcccgtccccgaggccgagcctgccgaggcgcccatcgcgacgcttgccgacatgatcggagccgaaggcgaggccgccttgctttcgctcacaggcggcgccgcgcgaggcgaggtgattgcattcgccgaatcgatcggggcgccgcaacgcggttacgccgaaacgctcgatggttcaacgctctcggtatacgagctgaccaagcagggtaagcagctgttcgtggctgcgaaagaatctcccgagaccgataccgtggaggttgcttaccgttttggcgatgcgggggagatacccgacatgttcgagttcatctcgatgttcgataagtgaggcacgtgatgggaaaacaatacgaaagcacggatcagaaatcgaagagccgtttcaaagcaggaggtggggtaatgaacaagacgagaaagcgcaagctcatcagcacggctttggcggctatgctcgtgctgagcatggtgctgattccgatggcgtctgccgacaacaaagcaagggaagaggcatcgggcgcagatccgcaggcgtccgtctataccgagaccgcgcttgacggcatggtgggcttgcccgacgatgccgatcgggacggagccgcggcggatgactccgcttcgcaagatgcgggtgcggatctgcagcaggatccggccgagggcgatgcctcgcttccagatgaaaacccgacggatcagggcggcgattctccgaagagcgccgagggcgcagcgccctcggacgacgcggatgcccgcgaagacggtatcggatcggcaaccttgtcgggtacggtatggcacgatgaagacgaggacggcattcgcggtgcaggcgaacaggcgataccggatttcgccctgacgctgtgcgatgaagcgggcaacggattatcgacaacgcgcaccgatgcgaacggccgctatgagttttcggcggtcgatgagggcacgtacagcatcaaggcggaatcgcagacggtggacggcgtcgagtacgtgccgcctgcgcccgaggctggcgtggaggaagacaacaagttcgaggaggagatcgaaggaggcgagccggtagcccgcaccgagccgatcgacgtcgaggcgggcgcatcgatcgaatcgctgagtgcgggcatgcgggcaatcgagcctgctgaagccgcgagcgagggcggcattgctccgctttccgatggcgtgctcacggtcgacgtgggcgagaagccgttgagctgggcgaacctccaaagtacgctcaagagcctgtattccgacgaggtcattgcggcggcgacggtgctcaagatcatcgggagccaggattcgttcgagctcggcagcacgtcgagtgctccttcgatcgtgcatctcaacggcctcaacatcgacaccatcgatatgtcccagtttacgggagggcttggcgcaggcgccttcaacggggcgaagaacatcaaaacgatcgcccttggaaccagtatagagactatcggggcggtgtcgttccaagggtgttcgtctttgacgaccatcagcgatacgctcgagaatgcggctgccaatccgggaatcatcgatttggcgagcgccggggtgaaggagttcgtcggaaactcccagttcttgggttgcacctcgataacggcggtgacgttcgggccggatgtcgaaacgctttccttctggctgttctctggatgcaaatcgcttgtggctgtcggcggctcggttgccgacatacgggcatatcccaacgtcatcgacctctcgagcacgaacgtgactgagcttgtctccaacacgttcgacggctgcacctcggtcaagcatgttgctttgggaaagaacatcagcgacgtgccaaaatacgcgttcaacaattgcaaggcgctttcgtcggtaagcgatactcctgcaaacgcccttgcgaatcccactgtgctcgaccttgaaaagacgggtgtgaagacgcttggcgcgggcggctggcagttcaagaacggagaaggctatacgacggtaacgctggggaaaggcatcacgtttcttcccgggtcggttttcgccggggcgaaatccctgcgcacgctcagcgatacgctggatagcgccctagcaacgccgaacgtcgtcgatctcggtgcgacgggcgtcgtcgatctcgaatcgcaagggtggcaattcggcaattgctcgaatatcagcacggtcgtattcggcacgaagatcacctcgcttccttcctacgtgtttgttggatgcatttcgctgtctaccatcagcgatacgctcatcaacgcaaggggatcgtcatacggtttcgtcgatttcgagaaactgcccgttgttccgcttacttccggaggctggcagttcaacggggtttacggaattctgtacgcaggcgccgaaggcctgtcgtttccctcgtattctcttggcggcatgaaggctttcgttcccgagaccatcggatcggttgagttcactgcggattccaaggcaagcaaggtttacgttcgcggccccgaggtttcgtcgccgactgcggttgtcggcagcgagcaccaggcggtgaactactatctcgatagcctggtgacgaaaagcggtctcggcacggtgacggcgtggacctacaatcagtacgacccgtatattcccgacagaatcaacgaaagggagattggcaaaggcaggctcgaagaagggcatcgctatgtcgaggaaggcaaggagctcaaattcgtcgttgagccgaatcccaacgctgctctgaaaaggatcacctacaacggcgagcctgtcgagccgattgcgatcgagaacacctactactacacgcttcctgccctgaccgaagacacggtcataaatttcgagttctccaatccgatcaacgtgttccatctgtatgtcgatcgttcgggcaatgccatcgacggctaccctgcggacgtgcgcaaggtcgatgagggcgaggcgtacagcggtacggcgcccgacatttccggctatgcgtatcagggcttcgagcttgatccgcctacgccgcacgctccctcttccgcaaccgataaggcagcgccgcacatcgacagggtgacaggcgccacgtatctgtacctcgtgtacggccgcgatgcgggcggcggcgaggtgccgggcgttggcggcggtggccgcgtgcccgacgggatcgaagacgtcgacgttgaacgtcaatggggcacgatcgcaggcgggtcgttcagtgcttttccgggaatctctcccgatacgcagatcgtgaacatcggaagcgaattcgacctcggggcaaccgacgctcccgtagagaatctgcccgcggggtacacctacgtcggctacctcaccgacaaggatccggcggggaccaagccccattccggctcccctgccttctccgcatcgatgaccgatggaaaccgcacggtgcactatatatacgagcagtccgtttacgaggtgaccgaacatcacgtagaccgttcgggcaagatggtcgcgcctgatacgtcgcagaatatagaccacggcaattggtaccccggaacgggctctcataccgtaaccggaatggtgtacgcaggcgcagagtatcaggccccgacggcagataaccgttcgatggtcgatgacggttcgctacccgagctcttcaacgtgcaggcggatgcggaggtgtggtacgtctacggctacgataacggaggaggatcgctccccggcccaggtggcgggggcgataggcctgacgggcttgaggatttcgagttctcgcgccagtgggtgacgcgggcttcggacggctctctggtaccgctgccggcggctgcgaccgatcgtcagattctcaacgtgggtacgacgttcgagcttgcctacgatgatgcgcccgtgccgagcatccccgctggctacgactaccgcggctatctgaccgatcaggatgcgcccggtgctgcgctgcatccgggaacccctgatatcgtgtcgaacatcgttgacggaaaccggcagatcagctacgttttctctgcgccgcttgaaagcccgagtgtcgatgctccgcttgaaatcgcgacgaccgtcactggatctgccgatcgaggcaatacggtaacggtcacgttcgccaacggacagacggcgacgggggttgcaagctcgctcgcgccgctctccgaactcgcttctgccgatgtcgccgttttacggaccgtggagacgggctattggacggttgacgtgccgtcgggagtgattcttgcgcgaggagacgaggtatccgcaacccagaccgattcgttcggacgcgtgagcccccttgcctcgacgaacgttctgcccgtcgatcacgatgtctcgattgcctatacggacgaatcgggcaagacgattccgggcggcacttcttcgactgttgcgcatcggcagcccttttcgtacgagcctccgacggtgagcgggtacacctacagcgggtggtccctgaacggtgcagatcagggcacggggaatccgagcatcccaagcgtgacggcttcccatgccatcacgctcgtctacacggcgaagggcggaacgactcccgatccgggaccgggtcccaatccgaaccccgaagaaggcaactacaacttcgtgaaggctcccaacgtgaaaagcgtcaagccgggagaaacggtaacgtacacgttcacgggcttcgaaaacaagtggggcgcttcgcttgaccgctatgccattaccgacaagcctgacaaggggctcgacttcgtgtcggcttccctcccgtcgttctcgggcgccgagggcgtcacctacgatgtggtgtattacaccaacctcaaagggcgcagcgtgctccattctaatatcgatgcgggcaagccgttttcgttcaacgcgccgtctctgggcgcaggcgactacataaccgggctcgtgatcgatttcggtacggtgcccgaaggcttcggccagggcaatcagatcaccatgcagttcagggtgtgggacaatccgccatccaagacgcttaacaacgtgggcatgctctcgtactggaaagacggagagtccttcgagttctcgagcgggaaatcgggttcggtcgtgctcggcgggtacttctcggatcttgtgagaacgggagacgggcccctgatcgcgatggctttagccgttggcggcgccgtggttgcggcggtgttcgttcttatcagcatgattattcggtcgcgccggaagaagcgcgctatgcggtaggtcaatccccgaagcgaaggcggcatctcacccagtcgctttcgctagggttttgatacggccgcctgcttccctagagcaggcggccttctttattccgccgttggtgaggctctggttacaaaataagaaagttctttcatttttctacacaatgtaatatattgcattaaagattgctagcatgataaggaaaaacaccgtgaacacgatggctggttgtatggaagcaaagagaaagcaaacggaaacggctgggggggggggggggggagctgtattgctgccagcttcactgcgggcttttcgaatgctcgcgtcgggcatccgctgccagtaaagtaatacagtacattattgtcggacgccgccggcttgcgaagcgagccggcggcgttttcgcgtcttcgcttgcggatgggcgtacaggatgcgggcagggaagcctgcggggtttgccggtccgatgcataagggagagtcgcagacgttgcggagtctgcgatgcgtaagacggagatgtacgagttgctctcgttcaagaaaagcatcgatatgaccctgagaaaaaagtacgggcattttaccgggcggcagcttctcatcttcgatgccgttgcctcgggggatggaacggctacgctgaccgaggtcgcgcaagcgaaccattgctcgacgcaggcggcgcgggcgtttgtgaacggactgcgcgatcggggctatcttgtcgtatttgagcccacgaatggcgatatgcggcgcattgacatagcgcttaccgataaggggagaaagctcgcccaggcgtgccccgtcgaagacatcgctgacgagtttacgcgatccgacaaaaaccccgaggtgcttttggccaacgtcgcactgttcttcgagcattgggcttctgctgccatgatgcaggaatagcaggcgcagatagcggactcttgcgggcgtgctatagtttccgcatatgcaaggtagcgcataggcggaaaagagcttgcgggaaaggaaccgaatgaaggcgaagatggtgcacgaatgcattcatgtacttgatttgcaggcgtcgatggagttttacgagcgcgctttggggcttgtcgagatgaatcgcatagaacccgaagatggcagctgggccatcgtgtacctcggcaacgatacgacgggctttcggctcgaactgacctggaatcgggggcgcgtcgagccgtacaacaacggaggcaacgatacccaccttgcctttgccgtcgacgatatggcgtcagcccatgaattgcacgaaaagatgggctgcatctgccatgaaaacaagggtatgggaatctatttcatcgttgaccctgatggctgctggcttgagatagtgccgatgtgagtttgctccacggtattccgttgacggcgaaggcgatggcgaatccgatgacgatgagcgcgattcgtccgacgatcgccgttttcggatcgaatagcagggcggccgttgcaagggcgttgacggtgatgaacatgatctgcatctcgtagttttttgcgaacatgtagacgtagccgaacagcaggatggcgatgggctggtattctgcgggaacaaggtagatgaaaaccacgacgaagacgattgctccgatcgctgtcccgagcatgcgttttccgaaccgctccatgacggccttccgttcgggttgcgtaagcgaaaacacggtaagtccgatccacatggccttatcggtttggagaagctctcctgccagcatggccgcactaactccgacggccattctcagggcgaaggagaagcgcggcgaatgcacgtcgattgctcggatgatggatcccacggacgcatccggtgaaggttttttcgcatgaaccgcccagtagactccagcgatgatgattccgcagatcacaaccgatgccaaacgtgccgaaaaggcgttttcgcttactgggatgccctggatgaaaagatagcacagcataaacggcagatacgacctgccttcgatgcgcgcggtcgtgagatacatgatagcgaagacgaaggccaggttgaaggcgagcagcacgaggggattgaggttggcaagcagtgccgcgcatacgattgcgacgaacaggccgacgatgagaaggggcgcctgcgatgtcttcacccctatatcggttttgagaaacatgagcagagccgtgatgagcgtaatgcccaccagcatgttttccgatccgaaccgatcctggaacacggtcatgcagatgatgattccgacgagaagagctgccttgccgatcgcgctgcgaagcgatatcttgtccatcccttgcctccttcgtaaagcatgtaccagcataccttaacgggatggggggccggtgccgcatgggctacggttcgatatcggtttggttcgatgcatcggttctcggcgcgatgcggaaatcgcctttgcgcggcaaggtacaaggactggcagagcgccctctcgtttgcggatggcgcgggcgggctgcggtgatgtgcggcctgggaaaccgaaagagcccgcgcctatgcgcgggctctttcggttgcgtggcgtgcctggcgtatcgtggcgcttaccgtgcggcgaagtaggcgtagatggacttcccggaaatgtcttcgctgtcggtgccttcgggataggtcatgacatcgaatacgtaatcctcgtatcccttgaccatggcgaagtatccgcgaagcttgtaggtgttgcccgggaaatacttcgcgtcggcttcggtttcgagctcatcgaccatacccatgcccacgtaacttccgcccttggtggggatgccgccgccttcggggttggatgccttgagggtctgctgcacgttggagagcccgaattcgcccgcattgaaatcttcgggaacggtcacggtgtaatcgacgatgcatatctcgacgtcatcgggcagctcggcgttcgctaggtcgatctgcatgaaatcgggcgctacggcgttgtggtcggcgaagcactgctcgacataggcgctgtcttcggtcgttgtggttaccttgtcgatcgaggcgtacacggcgtggtagagcttgtctcccgtcgagtagatgccgagctccacggcctgaccgataggtgcgggggattcggcgctggtgtcggtgggggatatcgcgccggtaagggctggttcgctgctgttcgaggtcgcgccatccttcgcggcgtcgtccttgttcgcgtcgtcttgcttctcgacggggtcaggcgattcgacgggctcgggttctttctgtggctcttcggcaggcgcggagcatccgaacaggggcaatgcgataagcatgaggccggcaaggaaagctgccaagctcgctctcgttgttttcagcacagtggatttcattgcggttcccttccttgattgaactaccttccaaaatgataacatcatacatagttatatggtagaaaatctgcatcatttttagggtcgggaatcgcttggctgctgtcggcagcagggcgcgtagccggtcgagagcagcccctgatgagagcctgacaaacgttggggtgttgtcgggttcgggtttgatgccgagcggaggtgtttcgttcgcccgattatgcctattgtcctcgcttttcaatccgctcgccgcatgatgagaaaaattagagcacgcgagagcaaaatttatataagggggagtatcattgtttgcgctttggaaacgcgtgggcaacggtatccgaacagtgcgatctgcggtggggacggatccttttggccgaagtccaaatcgatcgggttttcggttggtcggtctgcccatggctcccaaataggaaaataggaaaggattggatatggctaaggaaaccgatcactccacagaactcagacatggtgtcattggcactgtgcccctggcgtttctcgtgatcgcagctgcggcgcccttgggggcgtgcgctgcaaacatcccgcttatcatcggcctcggcaacggcatcgccgctccgatggacttcttgttcatcggcgtgctgctcattttatttgccgtcggctatacggctatgagcgcgcatgtgaccaacgcaggtgctttctatacctacatctcgatggggcttggaaagcggcttggcggcgcggcggggtatctcgccgttgcggcgtacaattttctgaccctgtacaccgctgcggtgggcggctattttgcctccgatatcctgaacatcgaattgggaattcaggttccgtggtggattcttaccgtggttctctacatcgcagtgtttctgctcggctactttggcatcgagggcggcacgaaatttttgatggtttgcctcgtctgcgaggttgtgattcttgcggctaccgatatctcggtgcttgttcaggctggccctgccgcctacacgaccgcttcgttcgatccagcgacgttcttcagcggggctccggggttgggcatcgcattcgctttcctgtgctttatcggcttcgaggcgacggccatcttcggcgaagaggccaaggaccctcgtcgcacggttccgcgcgccacctactttgcggttatcttcgtcggggtggtctacgcgttcacggcatggtcggtcatcgcaggcatgggtggcgatgagatcgttgccatggcccaatccgatcaggcgggcaacatcttctacacggtggtgaccacctacatgggcccgattgccggccatgtcttcaacttcttcttcatcatgagcgcgtttgcctgctggctggccacgcacaacatggcatcgcgctacctgttcgcattcggtcgcgcgggcatgctgcccaaggcgctcggccgcacgcatccgaagcacaaatcgccttacatcgcctcgatcgtgcagctggcgttcggcctgatcgtcgtgctcgtgtgcctcgtgctcggattcgacccctacacgcagatcggcgctatcgcctcggccatcgccgttgtgggcatcatgacgctcgagttgctggtgtgcgcttcggttctcggttacctgcgcaagcacaaccatgaagagggctatcactacaacgtcttcaccaccacgatcgcaccgcttttggcgctggtggggctgtgctacatcgcatttctcgtcatcagcaacttcgcgctgctcacgggtctggacaacatggtgctcaacgtcatcttcgcatgcctgatgtggatcgtcggcatctgcggtttcgttgcatccgtcgtgaaggataagcgcggcacgctggccgatccgaccaccatcgaggtggaggagtaggcgggttgttcgccgcctttcggctcgtgcgtgcttgcgttctggcggcgggctggctttaggctaacggcttggtcgtgcggggcgttggcatccgcgtctttcgctcgattatctggtgcggggcagctcggcaaatcgccgagctgccccgcttgcatgtttgctctcaatgcgatccgttcgctctctcatggaatcctactcttttactatcagttctagcgcatctatggcataattagtaataacttatataaaaatgaatgcatagatgagcgaattgaaaggatgtcatatgaaagcatcgcttcgcagcagggcgttcacctgcgtgatcgccgctattctagtgacgacgatggccattcccatcggcgcttttgcagataccgcttctttggtgcgtccaagcgcggaaccgcttggctcaatcgttggggaaaacggaggaaccgttatcgacgtgccgaacctgccggtaaacgttgggaaggttgaagatgagggagggcgcgacgctggcggagacggcttcgcgcttggttcgagaccgctcgatgcagcgtccttcgatgaaggcgtttctgcagcgccgctctcttcgggggatatcgtcatctcggcgggcggggcgacgacgctcacgctttttgaaacggcctatgtcttgagcggggcgcaaagcggctcgggaacgctcgatgccgacacttccctcgtcgttgacgagggagtgagcggtaatctcaccatacagggctctggcgccttgcagagcgtgctgcttcgttcctccgatgacatgttcgggctcgactgtacgatcgacatggatgcgaacgtgcgcgtctccgatagaatcgagaccatggatctgaatatcctcggagcgctcgatgtttcgagctctgcggttttggatgtaagccccgaatcgtattccgctatcgtcgatgtgtgcggttcgctgtacatgaacggcgcctcgtttacgggccgtgccgctccgtctgcccagagcgcttacttcctgcttgtgcgcgatacactcgaatccgctccgaacaattcgatgatactcaacggaagctccctttccctcatctccgattccgcggatattgccgtgatgttttcgatcgacagccaggatctctacgctttcgatggttcggtgtacgtggagcaggcccctgggtctgcgggaattgggttcttgtcaagctcggaaagtcctgcctacggaacggtgtatctcgatggaaacacgtacgtgggtgccaccgcgccgaacggtaccgcgataatctggaaaacggcacggcttgcgggcaatacgcaggtctttgccgacggcggcgagaggggcgctcagatacattacctctacattggcgatcagtcgtctccgagcaacgcgagcatcacggcaacgagttctttcatcgcactcgaagttctgcgtgccaccgaggtatacggtgcgggcaacacggttgcttcgatcgtggcgatcgccgatgacagccaagggggaggcgcctccatcggagccatccttcgcaggcccgttctgaagaacacgttcgtaagcgcgacggcgacatcggccatgcagcctacgaccggtctgcagatatacgatggccataacggatacgatggaaccgccgatcctgagcctcaggcgtatttcgagaacagcgcgctcgaggcgacgggcacggcggcgggcatccacatggcgtcggcgttggttggagagacgccgtttatcgggtgcgatgtgcgcgctacggtgaagcatgcgacgaagcccgccggtataagcgatgtgtccgccggcatcgtgtcgctcggtggctcgtaccgattcctcgattcgactgtagacgcctcgggcggcaactacggatggctgagctatgaggacgatgagagcatggagggtctcgggacccgcgtctatgctgaagacggatccgatttgacgcttgagggagaacgttcgggcatcgcggtcaaatctcatatcgaggcgagcggaggttcgaccataacgggcatcgctttggccgtcaacccgcttaacggcaatgataacgttcccgccgtgcacgtatcgcagcgcgtgccgggggcggacgagatacgggctgatggcggtacgatcaccgaggtatacccaacccacatcggccgcgcgatcgcaccgagcgaaggcgagtcgttcagtccctatgcgatgtcatggaatgtggcgagcccgcagcgctatgcatggagcgtcgacaccccgaacatagagcttgccgcgaacggcgcgggcgtgtatacgccatccgatacgggaagcggtgttcccaatgtgacggttaccgcgacgcgcgcggcgacgcacgcttcggagccggttgtcgtggggggcagcggatctgcccataacgtcgtgctgctcgccgacatcgggccgcaggctgccgatacggtgacggtgcggttcgagccgagcggcggtgccccgaagcccgccgaccaaacggttgagaagggacagcgcgcagttgagccgaccggctcgaaggcgcccgtcagggagggttatcgattcgcaggctggtatactgatacttcgctgagctcccgatgggattttgcgagcgccgtgcagcaggacatgacgctgtatgcgaaatgggacaccactgcgagcgttcctgcgaacccgaatccgactccgacgcagggttcgggcgcgggcaagggcttcgccccgcgaacgggcgatccgatgctcgatgccgctttgacggtagcgctgtttgccgtcgcctgctcggtgatcgcgttgggtgcgaagctcaacgcccgccgaagggcctagcctgatcgggaagcatgctggtagcccggctatcgccgggctgctggtgttcgtcgggagcgtcgttcgatgggtggatcggcaagtgctcccgctgatcgagggtcgagcctgcatgtggcaatgatattggcgcggcgatgccgcagcgctgttcgtccgatgtgcggccgagtgcgtataaacgataggagcgcgatgaaggcggcgagaagaattcttctgattgtgttcgtggtgttggtgaacgtttctacggcttcgatgctgctgccgttcttgctgatggactccgacctgctcaatgacaccggtttttttagctttctcatgacagcgggcgtcggcgcgcttgttctggcgtttttcgtatccatcgcctgcgttgtggtggctttcgcatcgcttggacctcttgcttcgcgccccgatcagcagcgggggttgggtttgcaggtgttcgtgtgcaagcttttgatgattccctatttcgtggttacgttcgcctatgcgtttttgttcgcgttcgccagttctcttctgacgctgagcatccatcttgcatcgttgggtatcatgttcggagccatgatggccgtgctcattccgattatgagcttggtgaactacctgtttctcatggcgacgagctcgtttgccgtatcgaatattgttcttgcgtaccgcaagggcctcattgccttttccacgaccgtcgtgttcgttatcctgcagctttttccgatcgtcgacgttgcgagctacgggtttatcgtgaagcacctccgcacgcttgaatcccgggcgcaattgcgggcgggcggcggcactctctgattcggcgcgctcgtcttacggatcgcatcttccgcaaggctcgtatccgctctccaaaagctcgttgcgcgtgcccgtgaactcctgcttgttgtgctctgccatgtcgtcgaccgatttgcagttgggatcgtggaacttcatggagcgcgtgttgaggatgtagacgcgctcctcgccggctgcttctgcatcttcggctgaggcgccgctgttatctcccgtggcgtaatcgatctcgacattcggctggacgttgtagcagtacgcgttgaagcgcacgcccgcaccgccgtcctctatcgacagagcctcaagctgcacgccgcggacaacgagttcggagccctggaagaggggggtggcgcgaaaaagcacgtggttgcccgtttctttgacgtaggcggcaatctcgttttcgagggggagcataccctgcgtgttaagatagcgcgtgcccgtgataaggtttcgctcgttggcgttttcgccggtaagctggaagccgatgaggtggcatcgattgtaaaggtacctgccgtcgatgaaatcgtatttggatatctgccagcccgagggtttcaccatgccgatgctgccccgctcttcggtaggcagggtctcgggtccgacgagggcaacggccggtccgcatcgtcccaaagcgtcgagctcgctgtacgattcgaggccacccgctttggcggcatcaatatcctcgtcagtgaagccgggccgaccgccgtcgacttccacagagggctcgcctgcgtattcgggaatctccgagagtgcgatgctttcggtgcgttcaaggccttgggcttggttcggggtggcgggggcgtgggagcagcctgcaagggcgagcgctgcggcaagggcgagcgcgagcgcggatgcaaagagttttcgtacatggttcggcatgacgggattatctcatgcttcgtgcagcgtttcggtgcgaaaggcaagacggccgtcgagcggccggtgctatggtatgcttggcaaaaaggaggcacgccctatggaaaacaagcagccgtcgataatcgatttgttgatcgaaacccatgtgggattagagaggcagggtcccggcagcaccgaaacaacgtgcaaagctctcgggttccttggcgatctcgaacaaatctcgaacacggcagatttgggatgcggaagcggcccgcagacgatggaacttgcgcgccacttgtccggcagcatcgtcggtttggatatgttttcagatttcatcggcgttctcaacgagaacgccgatgaacagggtgtcggagaccgggtgaggggaatcgtcggttcgatggatgaccttcccttcgaggaggagtcgctcgacttgatttggtcggagggcgcaatcgataatatcggcttcgaaaaaggacttgcgcattggcggggcttcctcaaaaagggcggctacctcgccgtaacctgtccttcgtggctgaccgccgagcatcctgctgtcatcgaggggttctggtcggatgctggaagcggattggattcggtcgagcataacgttgccattctgcaggcatgcggatatcggttcatcgcctccttcgcgctgccggaatactgctggaccgagaagtacttcgttccgcgcgaggtggtgctcgaagagcttttgaagaagtatcccgatgatgaaaccgcagaagcgttcgtcgcggaaaaccgatacgaggtggatctgtactcgaaatacgggcagcattacggatacgttttctacatcggtcagaagctgtagaaggccggttcgggtttttagcgcgcggttggcgcacattgattttcggtggcctcgaaaacagaaacaggtcagtcaagttcccctgactgacctgcactttttctggagccaacgagcggattcgaaccgctgacctacgcattacgagctaaagaaaggccaggtcaagtggcatttttaagtgtgatctggaatgattgggctataggtaacgacaagtaacgcaaagagacgcattgcgcatttgcgggtgatttgcgggtgaaaggtaaggcgctcccgaggtcggcgggggcgctcggcctttaggaaggagggcatgcgcgggccgttctcggtttcaggttttatcaggttgcaggggcggctggaaggcttcggggcggtttgccgccatgccgcgtctggtacaatgacgccgaggggcgattcctacccgggttcaggtcacgggtgtctgggcgtccctcgtctcgctttcaggcttccaggctccgcgagtcggctgcaaggcgcgttcggcgtcgtccgcatcgtaccgcatccgcatcggtggtgcagggcatatcgcgaagcggagccgtgtcctgttaacgagttcagggcgtgccccgcctcttacggtcattctaccatgttccgatgcgctcgctctcgcgccttacagcacccgtctacctgttcgggtatccgagtgcattccgacggagatcgcgccttagaacggcttagaatcggcctgtaggatggaagcgcagcgatccgcaagggtgtcgtttcaaatgatgcccttacttcaaataaggctcctgccgccaagggcgtgtttgctgaacgcatcccaaccgccgaactcgataacgtttcgttattcagatgcgcagcgccctatgcagggcatggccataaagaggaagcggagccgtgtcccgtcgttttccgtcggggcgtgctccgcctctgccgctattctaccacgatccgatgcgccgcctcgattccgcccgctgccaagggtgtgtatcgaatacacccccccctcgctctcgcgcctcacagcgcccgtttcccccttcgggtatatccgacgaatacatttcttcggataccgcgccttagaacggctcaggatcggcatgggcgcgttttgagaacgccccatgcctgccgcgccgaacccgtcaggggcatatccccctttcccgaagctcctcgtgctccgcataggctgctctcgcctcttcgggggcatcgtccctgatgccgatcacccatccccatttctcgtcgcgcacggcgtactcgagccagatcgggtcttcgagcgtcatgcccgctccgcagggtcgatcacgagtgcggtatcgggcacgtccgcatgcggcaccgctgcgagcgagtagccgcacacgccgagcatggcggcgagtgtgtcggctttgggggtgcttccgcgcgacatgcccgtattcacatacggcgcgggctttcccatcgctggcccgatatgggtaagaggcacgcccgcatgctttgccgcgctcctcaatgcttcgtaagctcgcatgagcattcctttctcttattgcatccgattgtattatacaactgtgtaagaattatggagtagactattatccagttgtataacattacacaagagcgtaatattcgtatcaggcaaggcgggagctaccgagggcatcgtgcaggtgaaccgaacgccgggccgacctccgaagggaggtgaaccgatggactttgaaaggctggggtcgatgctaggcgcggctgctaacgtgctgcggctgatcttggagctcgccgagcggaagcggggcggtcgaaaagagaggcgggcgcgccacgcaaggcgaacccgctagacaaacgtgctgggcggcgaactttggcaggcgaaccgctcagcctccatcggccattgtagcaggctcccgcctgcgaggtaaaggcagggcaccccgaaagcgtggaagcggcagggtgccccggatacggcgcgaaagatcgcccgtaggaaggaaggataccatgaaagacgcgaggagagaggcgctgattgcgaggatcgagtgcgcggcgagggacatgctgtgctgcgccgcgaggctgaaacgcggtgccgatgcggatttccagacgcttctggaagctgcgggcgacgcgcataccgacgccttggagctgtccctgtcggaaggcggtgcgcgatgatggcgaggatcgacctcgctaccgaagccgagggttgcgcctacagcgtccgcacgctctcggccctgctgctctgcgtcgccgaaggcttggaacgcgatacgaacgagcagaaagctgtggaagccgcgcgggagtacgccgagacgataggcgacaggatgggcgtgttgaccgcgaagctgtacgatgccgttagggaaggcggtgcgcgatgatcccgaccgaagtgaagcggtctttcgagaacgcttaccgcgacttagaaccgaagctcgtcggtaccgcgatgtgcccataccagttcacgtgcgaggcggtgtcggaagatgccgagatcgcccgtgcgagcgaccgagagagcaccgaggtcgcgatcatcctcgctggcgagatcatggacctgcgggagcatcgcacgtatgaattcgcgctcgtcatccgttatcggcttgttcgctgccatggtttcttacctccgtgtacaagcgtgcacacccgtgtgaaaaaaaggccctatgccgccgggcgggccttcgggggagggggaggggcgatgccccccgcccttgcggctactcgccgcgaccttccgcaagcaccgcttcgagcgactccaacgccgccctgtgcagcctgaagagctgggtttggctgtacgccgtctccctcgctatctcgcgccattccctgccttcgaggtagcgcatgctgatcacctggccgtgcctcgggtcgggcaggcggtcgacgaccgaacaggcgaaccgctgcaaggcgatgtaatcgtccaggagtcccgccagctcgtcgcggtagccttggagcctgtcgagcgattcggccagcctgtcgcggcgcgagccgcccgaaacccgttcgaacgccggatcgcagccgcgcacgccaagcatcgagtcggctgcttcgatcatctcgcgggtgcgccttatccgctctgcgagccgcctggtgtcttcgaggaaccctttagccgtgggcatggtgccgacttccgcctttctcctggcctatccaaaaaacacgcgcgggctgccgcctgcgcgtttcgctggggcgcggtggtgtacggggtgcgcccccgcctttccatcctataggggggctaccctttcgcggggttcgaagccctgcgcccagccgcctggcccctgcgcctctcggcagactcgcgggagagcttcctgcgcctcgcgccctcgccgtgcgtcttctgccccttccgcttgtagtagtcgctcaccttgcccgagctgctccctcttcccatcttctaccttcctttccgtctgtctttctcttccttcttgcgttccctgatcgcgtcgaacctctcctgcatctcgcttccgtaccaaagcacctcggccccgcaggcgtcgaagccgcattcgcgcccgtaggcgagcacccgtttcggcgcgagccttcgcgccgcctcctctgcgccgtttcggaacagcccgatgccttccgagcagtccatcaagcccacggtcgagagcgcaacggtcgatccttgcgggacgccgtcgaagcagaacgcgtacgtgctcggctcgccccatgtgagggtcggcaccaccttcaagcccgcgtcctgccatatgcgccccaccgcgcggctgcggtagacgttccacctctgcatcggctcgggcatgtcgaggtagcacgagaagtcgggcgtcaagacgcagccgaagcgcgagagcatgggaacgtagcgcacggggtcgctccaaaccccctcgaagcggtagtcgtcgaggaagaagtggacgcccgccgccccgtcgctgcaacgcgggcaggacgtgaacgcgcggagcctgcggggggtgaagcttgcggggtcgagtgtcggcatgcccgtggcttcttcgacgccgaagccgtccagcaagtggaggttgtaggcgcggcgcacgcggtcggatcgcgggttcatggctccgccctctccatgaagcggttctcggacggcttgaagtacatgggaacgtcgccgacccgcccgaagcggttcttcagcaccgagaccgtgacgggcctcaccgcagcctccctgttcgccttggcctcgtcgcccgtgccgtcaaccgagacgaacagcaccacggatgcgctgtattctatcgccgacgaccccgcgagcgacgagagcgcgaccgataccctcccgctgcggttcagcgagcttatgacgaccacgggcgtcctgaaccgcttcgcaaccgagcacagggcacccatgctggcggtgtggtgctgcaggtcggtctgcaccgcgtcttcgcgccctgggagtatctgcaggtagtccaccacgagcacgggcgcgggctcgcccgggtcgagcgcggattcgtacaaggcggcgacctcctcggccgaaaggggctcgtccagcgtggccatgttgggggctacctcgcgcctgtaggcttcgaccgccccgcttacggcgtcgaggttctccgcatccatgcgcatcacctcgcgggcggtgagcgcccgcgagctctccgccgacatgcgcgatatcgacttcgccaccacctgcggggcgctcatctcggaggagaggaacaccaccttgcggctcccgaagcgggccacgtggtcggcgatctgcagggcgagcgtggtcttgccggcgcccggctcggcggcgagcacgtacacctcggggtacaggccgcccccgagcaccgaatcgagcgacgcgaagcccgtcgagccgcacggcctcatcgccgccatccgggccatgatcgcatcgagcctgtcggcgttccactcgatgcggccttccgccgtcatcgcgcccctccgatgcgggagagccgggcgcgcctccaagcgcggcccggcggtgccgccgcgaaggcggtcctcgcatgttcgtccttcaagtgagtcaacctttcatgaccgctccctcgcacggctttggggccgtgcgggtcgctcttattattgttcttgttctgtgtgcacccaggtgcacgattttcgagccgttcggaagccgtttcccgcgcgattcgttcgtaaaaagtgcacgggggtgcacgattcgcccgtcagccgaaaaagtgcacccaggtgcacgattcggattgggaaaagtgcaccagcgtgcacagtcggtgaacggcgtcacgcttccgggaacccgtagacgaccctctgcccgaccttgcgccgagagacgaggccgagttcttcgagccttccagcggagtagtacacggcacggcgacctaggcccgtcttcctctcgatgagcgaaacgccgatcggcggggtctccgccgttttggcgctcctgcaagacgcgagggcggtgtacaccttccaatcggagccgttcagctgcgggcacacgaagtcgagctccctctgcgtcatcgagaaccacggctcacgccccgccatcccgcaccatgtccaggatctcgcgcacccacctcttgggctgccgcacgaggcgcggcaggcggacagcctccatcggcgcgagcatttcgccctgctgagagttgcaccacagggcggcgtcgtgctcgaactcctcctgctcggtgcgatcccgggccttctccatggcggcgaagcgcctgccgcactcggcgacctcgcgcctgcgctcgatcctcctgcggacctcccggcgggggtacaatggcctgcgggctccgagccccgttgccgcgcccgcatcgccgcatctgctttccagggcagcggcgcgtgcgggcgcttcctccttaccgaccaactccgactcccttcatgacgtactcggcgagttcggtcttgggcacgtagagccgccggccgatgcggcaggctggcaagcgcccgtcgtttatctccttgcggatcgtctgctcgctcaaccccgtgatctcgccgatgcgctgcacggtgatcaggtcgctctctccgtcgaacagcgggcgcggctgctgcgggggcgtctcgctgatgtaggccatgcggcaaccgtccgccgcttcgttaatggacgacggcaagaacgtcatcgggcacctcctcgaacagctcggcggggtctccatcccatccgagggcttccgctatgcgcttcccgcgatgcgggtagggcggctccttgcccgtctcgatgcgcgacatgcacgactggttcacgtctgcgaggcgggcgagcttcgattgcgacagcccgcgcttgcggcgttccaaaacgattcgtttcatgtttgttcacctcataacctattgaccgcttgaattgatgcgggtatattgtcgtaagaaaatgtcttgcaatcaaatatggaagttactggacatgaatacgcgatatcaaatagaaaatgtcaggcatgctccgatatggtggaggcatggcccggtaattcgactgttcgaaaacaatgaggttgtcggctatgaaatggatttatttcttgagcatagcgattgctacgacatcgaaaaggtcatgaaacaactcgaagatatggaagaaaagcatcttacaaaatggccgttcctcgatcctttggataaagacgagttcagattaaagctcgataaccttccaacggaattcttttctcatcagctattggatgttgatttgcgcaatgaagagtcgctgtttgattttttatgcaaatgggggtttccgtattcgcccgccagaaacgatgaggtatgctgcggcaattttggggatctttttatcgcaagccgagaagggatactcgaaacggaagaaatcttgaaaaaagggacgaatcggagaatatgcatatccaggaaagaagctgcttcgaccctttgcgtttttcaaactatcgttgagctgatgttccatgcgctcggaggcgaaagcgcgcctctgctggacatggctccggtgaacgccgcatcatgcaatccctttcatcttgtcagctatccctcgatttcggtgtcctatccgcagaaaaccgatctgagacatagagggctgcttacctgcgcgattgcgaatcagataatcgagaccatacgcgatccgctgccatggagaaaatgcgcttgcgatggttgcagggttctgttcaagagaaagcagtcgggaagggcgaatcctgattcaaaatcaatttactgttccacaaaatgcgagcaaaggcaatgcaaacggaaccagagagcggcagcgaaaaaccgtatcgaacactaaaaccgaccccgcccgctaagggcgagcctatagcaatgcaagcgcagatcgaagatcaggaggtgaaaacatggcaaaaggagacggaagcataatcaacaggggcaggaacctctgggaagtacaggtaagcttcggcaaagacccgatcaccaagaggtaccgcaaggtgagccggacggtgcgcggcaccaaggccgaggcccgcaaggtgcgcgaccagatcaggcgcgagcacgatagcggcatgagcgccgacgcggcaacggtgacgttcgcggaggtcgccgagatgtggcagaggagccgcgaggcttcgggcgagctgtcgttccgaaccttgaaagacggcgagtacatgatcgcctgctattcgaggttcataggcggcatgcgcctcgccgacatagacccctacacggtcgaatcgctctatgcggcgatcaggaaggagaaggccgacgccggccgacccgtcgggggaaccacgatgcacaagttccacgtggtcctcaagcagatattccagaaggccgtagacaacgacctgatgatgcgcaacccgtgcgaccgcgtgaaagcgcccaagaaggacgagccggaaaggcgctcgctcaccgtagacgagggcgcaaggctcctgcggctcgtggacgaggccgaggaggaagcctatagggagatggccgagaaggaggcgcggcagaccgagcggggcaacctgttcggcaggacggcgatacgcgggctctacccgctgggcaacgtcctcgccgtgcgcatcggcatcgccacgggcatgcggctcggcgaggtgatgggccttgtgtggggcaacgttgacctgaaccagccgtgcatacgggtagcccagcaattgaccacttacggcgaggtcaagccgccgaagggcagatgcaagagccgcacggtcgcgctcgatgcgactgccgccgcccatcttgaacgctggaagaggcggcaggcggtcgagctgctgaagatcggcatcaagcaggatgataccacgcccgtgtgctgctctgatacgggagggttctacagcgttcagaacttccagcggtggtggaggccgtggagaaccgcgcgagggttcgagtcgctcaagttccacgagctgcggcacacccaggccacgcagcttctcgccaacggcgtggacgtgaagacggtgcaaagccgcttggggcactccgatgcgtccatcacgctcaactggtacgcgcatgcggttcccgagaacgacgagaaggcggcgaacctcataggcgagctgttcgcggccgagcacgacgagccgcgcatcatcgaggtgaggacggcgtgacgggatcgcatcggctttcatttgcggatgatttgcggatgggcggggtatttcactctcgaaaaagcaaacaggccaccaggttttactccgatgacctgcgcgtttcgtggagccaacgagcggattcgaaccgctgacctacgcattacgagtgcgttgctctaccagctgagccacgttggcgaatcggcttcacaagtgaagcgcgaacaagaagtatagcgaaacagccatttgtccgcaaggtcgaaatggccgagaacgcgcaattatccatgaacgcccgatcgggcgccgctcttgtctcgtgcgagcgtctcgaaatttcggagccgctcttgacgatcgcctgtcgcaccgggtgcttgtgcatgcctctccgtctgccatttgtgcggtcttatacgttttggaataggttttagcaggtcaataccttcattaatcgttgactagtcgcgcgaggccagaggaatcctgcttttcgttgagccgtctcctcgttttcgtacatcgcggcgattcccgcgtttaactcctcttcctaccattccccttgacgcactgcaggtgttcgcaactttgtaatcggcgccgatataccgtgcgaacatctcggccattcgcctggcaaacaaacgagtgtctgcgtcgtggggcggtttcatcttggacgggtttgcattcgtccgaaaaacgaaggtccatgatgggatgcttcagagcaagccaagaagaaaccgattgatacgatagggggatgataatcaatgagcaacgcaaacgtgcgcgattatgcgaaatcgggctatggggcggaaagcgatccgaccgtgaagcgtacgcgaaccatgtgtaccggctgccacaaccgctgcggtgtggtcgtctattccaaagacaacaagatcgtaaagatcttgggcgacagggaacacgttttcacgaagggcaacatctgcggccactgtttgagccaacgattcattcacgaggacgaatcgcgcgtcatctatcccatgcgccgcgtcggccaacgcgggtcgggcgaatgggagcggatctcgtgggacgaggccatggagaccatcatcagcaaaaccaaagagctccaagcgcagtatggacccgaatccatcatcgtcggccagggaaccagccgatcgacgaacgactggcacatgcgcctcaaccacacgcttggcggccacgcctgggggttggcgcccctgcacgtctgtctgagccccgtcatcattccgaatgcgctttctttcggcgtggggcaggacacgggcgccgatttgatggctcgttttagaagcgaccccttcgcaacgaactgctacgtgctgtggggaatatcgcctcattgcctgatcgagcagtttcacgtgatgagggagaaccagaagaagcatggggcgaagatcatatccatcgacccgcgtttcaacgagctgtcgaacattgccgatatcgtgcttcgcccgcggcccggcaccgatggtgcgttggctatggccttcatgaacgtaatcatacgcgaggggctctacgatgccgaatggatcgagcattggacctacggtttcgatgagctggcgcagcgggtgagcgaattcactcccgaatacgccgaaaagatcacaaccgttcccgccgatgacatcgcagaggcagctcgcacgatggcaaagtacgctccgtcgcagttctacaactacctcgggccgaactgcatgcattccaacgccattcagaacgggcgtgccattacctgtctgatcgggctgctcgggcccgtcgatcagcctggcggctatgtgctcaatccaggcatgggtgtagcgtcggaagtcgagctcacgctgaacccgttcgtcgacttgctggctcccgagtcgaagatgatcggagccgaagattatccggcgctcccggtgctcggcggaacgcattggccttacggagtatggaacgccatcctgactgaaaagcccttcccggtgaagatgctcgtgttcatcgcgagcgatgcgctcatgtgctacgagaacccgcagaaaatcgaggaagcgctgctttctcccaatctggaactcttggttgtcaaagatttttacttttcagagacggcgaagcttgccgatatcgtcttgcccacctccacgtggtccgagatcgagaccactgaagacgagcggacggaagggtatttcattcccgcacgcgcagcggtcgaagcgccgggcgaatgctgggacgattgggatttcatcctgcaatacggcaagggcatcaaccctgaacagtggccgtgggagtcgcatcgcgagatgcttctctggaaactcaagatcatgtatgggattgagatgacgtgggatgagtacatagcgagcgatctgatcgagatccgccctcatcttcttgctgaaaaccgcgattactacaagcacgaaaaaggcatgctccgcgccgatgggcagccgggctttgaaaccgctacgggtcgtttcgagttctggtcgggcgccacagccgagttcggatacgatctgctgcccgattataccgaacccgccgaatcgccggtaagcgcaccggctctctcgcagcgctacccgctcgtgttcgattccggccaccgcctgtacatgttcttccattccgcgtggacgaacatcccccagcaacgagaactgtatcccgatccgttcgccgtggtgcatcccgacgatgcgaaggatcgcgggatcggggacggcgattggatcgaagtggagtctccccgcggttcgatcacggtcagggcggttgtttcagacgaggcgaagaagggcgttgtgttcacgccgcgccccggttggaagatggattgcaaggagctcggcttgccggggcacggctggaagggatcgaactcgaacatcctggttcccgctgagccctgcgatccgcattatggaaattcgcccatgcgttcgacgctctgcgatatcaggaagagctcggaaaggagcgctgattgccgtggctgagaggataggattttttgtcaacaccgactactgcaacgggtgccaggcctgccaggtagcctgcagggagatcaaccgcgtacccttcggcgaaacgtggctcacggtcattcgggacaagccgaagatgaggggaaaagagaagctgcaaatgcgctttgcgcatattcccgagttggataaatgcgcattgtgtctcaaggaagaggaggagccgtattgtcaggcgatctgtccgtctcgatgccttaaagtaggctattaccgagatatggctcccgtattggcagattcggacgatcgttggtctgtttcagtggcaacagccgaaagcgaggggtaaacatggaagacggtaccactacgaacatcgctcagtccgaaagcggttccgaccaggggaccggaaaggttaagggtaaaaacgtattcaaaatcgcgggtgcgatcatcgggttcatgatcggcgccgggttcgcaaccgggcaggaaacgctgcagtactatacatcggaaggattctggggcttggcgggcgtgctcgttgcttacggattcgtattctggctgttctactgcttcatggttacgggttctcgcacgaaaatgcgccattctcgagaggtgttccagtattactgcggaaaatatctcggctgggtgtacgagatccttgccatctcgatgctgttccttgtaacggtaacgatggtttcgagcgtcgggtcgatcgtgtcccaatacttcggggtaaacgagatcgtcggccgcctcgtcatgattgcgctcgtgctggcctccgtcctgctcgggctcaagaagctcctcgacgtgctcgggccgctcggccccgtcatcattgcgggtttgatcatcatcgcggtcgttgcgatcgcttccaaccccggcggcttggcgacggcccccgaattcattgccagcgccgatccgcccatgctgaaggcgtctggtttctggctgctttccggcatcttgtacggcatcatgaacatctatccgctggcctcgttcgggtcggccatgggcgccgatgccacctctaagaaggaggctatcattgcggctttggtcggcgccgttgctctggctctcggtgcgatctgcatcacgctctcgcagctggcgaacatcgacatcgtgtacaaccaggagattccgacgctcgcgcttgcggcgcactatatgcccgccgtcgccggcgtgttctccatcatcttgctgctgggcatctacacgactgttacgccgaacctctgggcggtttcgcaggcgttcggcaaggacggctcgaagaggtacataatcgccactattgtggcgggcgtgctcgttttcgcgatatcgtttttgccgtacggcgagctgatgaacatgatctatccgtttgccggatatgccgcatatttgatgatcatctgcatggccgtcaaacatatcaggttgttcgttgcgaagcggcgtgcggcaaaggactaggacgaagagccgcttgcagccgaagacccccgattgcgatggggccggcgcaggcggagatgatctgaaagggaatgcgaggtgatatgaaaatgcgcttggagatcaatacctttgctcgaaagggagacgttctggatgatgaaaacaggctcgtcgagcgcgtgggcattgcccggggcttatccgagagcaattcggcgagcgaatggatcgcttcgctcgacgaatcgctgtgtaatgcgggctacgcaatcgtcgagtatccggaggtggcgttgccgctgaccgtcgaaacggccgtcgatcggtttgccatccagctgaagcccgtttcctaaggcacgggattcggcagggcctcgtacgaggatggattcgttcgggggacggcaggctagaaggcttcgcgcaatgcggcgcaggtgctcggtgcgggcacctgcgcttgccgtttcgggcatgcgagcgagtgtggtacgcttgtcgcggggtctcgcaatgaatggcagcacccgtgctgccgctagggggatagcatcatggcttcgaagctcggattgcacgtgaagggtaaaacggtgttttcgattcgatggctcggcgctgcgttcgcatttgcttgggcgtggcttgccgtgttcggcaatcaaagcgtgttctatcctcccggcgcaaagctttcgctttttatcgggttcgctctggctctgctggcgctgcgctttgcgccgggtgccatgcaatcgctttcggacaaggtggtcgtaccccttgcgtgttcggtgctcacgcttgtgacgttcgtgctgtgcgctgcaaccgtctggtcgttgatcgatgtcgattggatcacgctgtctctctccatgggcttggcggggttctgcctggctttgatcgtgcgatgctggatgggcctgtacgctacgcgcaaaaccgatgccatgaccattgcgattctcatggcgcttatcttctctgctgttctttactatgtgctctggattgtgaagccgctgtattggggcatcgggtggatggcgtttcccccttgctgcctggtggcgttctacctttgcacgccgcgcgattcgtgcgaggtgagttctcgcatcgtggtggaggcgctcgttatgcagaggcgcgggctacgcgctcgcatcgtgctgcttgggtcggtgtttctggccgcgggcttttgctatggggtcctcgatgcaacttcggaggcgagcttcgccttcagcccgatcggaatggggttggtcaacctggccgcggttttcgttttgtggatgatcttctcgcgcaagtcaggatcgacgatcatccagtacgtttgcttgggtttgctggcgattttcgccgttttgttcgtggtcgggggtgctggaaccgatatcgccatgtccattatcatgggggcggtgatatcgctcgccctgtttttggcgatggttttgtgcatcgacgtatcggtgacatttggcgccgatctgggggtcatgtgcggtagggtagggctttcttcggttgtctgccttgtcgggggatgcggcatcgcctttgcggcctcggttcaatccgttgtttccctgccgcttttcgtgctcgtgttcatcttcgtcgtcacgctgttcgctctcggtgcgattcttctgtgctcgccgacatggatagcatacgaactctcggacggtgcgagtgacgaactcgaatcaacgatcatcgaagatataaagcgcgggttctcggccagtatcgaaccaggcatcgaacaggatatccctgttgcaggcggcgatgaggtggatgtgcggcagctgagcaatcgggtcgaagagatcgcccgactttacgatttttcccctcggcagacagagatattcacatatctgacgcgtggccacaaagccgatttcatagccaacaagctgttcatttctcctaatacggtaaggacgcatacagcgaacatttatcggaaactcgagattcacacccaccaagagctgctgaatttcttctatggcgaatagggcggcaggcgtttcggatccgtcgccggtaaaacggatggcgtcgggcgacgatgcagcacgaggcttctgcggaaggcggaacgctttgctgaaaggagcgaaatgtgcgtagtgtgcaacccggcatgcggtaagtgcaggccgattcggagaagagccgtaacgtgcgtcgaatgcggtaccgtggccatggtcgatgggaagtgcgtgctcgccggccaggcgacatcatgcccgaagtgcaaagcttcgctgccgatgccgaatgtgccgaagctttcggcagcagggagactggcgatgcccgaagcgaatatacgtgggaattcggcggccagataggcgcaacacgttacttgcaggtgtccgaacggcaagggtttcgaatcggttttcgcttacgagctcgtcacgcgcgtatccttttaagccgtaggcggatgcggcgttgccgcgggcgagcaaagcgaggatgcatcatggaaacgttcggcgggtatcggttgtacgttgggtcgtatacggcccacccaggtgatgcgggcgtctatcttgttgatgtcgatcccgtgcgccgcgcgtgcaccgttgcgcaaaccaacgacgagacggagaacccttcgtttctgctgctgtcgaacggccgtctctttgctgcaaacgagcaaggggattgcgctcgattttcctcgtttgccatcgagggcggaggcgctttgcgcctcgtcgattcgtttcgggccgctggagccggcacttgccagatcgccctcgatccgacgggtgcgcgcatttacggagcgaactacgagagcggctcgatagtcggatgccgcgtgcgcgccgacggtacgttcgagccgggctttcggcctgttgcgcataggggatcgggcgtcgttgccgaaaggcaggacgggcctcatgtccatatggtcggtttcgctccgcatgcttcttcgttgctggccgttgatctgggtatcgatgcgctcgtttcgtatgccgtgctgcctgacgggtcgcttgaagaagcctctggcttcgtgctgcccgttgccgcaggcgaaggaccgcgcatgttggcccatcatcctgtgctgccgctcaccgtgctggtaacagagctcggcaaccgcgtggtgctttttcggcgcgaaggagccgggctgccctcgtggcgttttcttgcatcgcattcggtcaagccgaccggcttttcggatggcgaatgccttgcggcccatgcgctgttctctcccgacggccgctacctttacgtttcggtgcggggtccaaacgagatcagggttttttccgtcgggcaacgcgaggcgctcgaattgcgctcgcgccactcgagcggggggtcttggccgcgtcatatggcgctctctgacgatggatccatgcttgccgttgccaacgagcgcagcgacgaggtggtcgtcttcgcaatcgatcgggcaagcggggctcttggcaacaagattgcccgatgccccatcacgcggccttcgtgcgtggtgtgggcctgagggttcttgcagcgcgcttcgatcggatcggatccgaagatgcgaggggatcgcgagaggcgaatcgctaccgcggccgaaggcccgatccgcagatgctcatgttctcgaagtgctcctgcatccacgtcgagggaaactgctgatcgagaaaatgatctatcggagatgccgcgggcaggtcgtcggcccgtgcgctttctcgtgcgaaggcctggatggtgatggcgatgttgaccaccatgaaaacggcacccaggatgctcgccgcgcgaaccgccgtgcttctccaatcgatcctgcaagaagcgcgggcgatgcgcggggtgacgatgcgagtccagataaggccgagtgcgccccacatgagcgcgaatgcgaggttgacccttccgtcgatgttgccgagcgtgccgctgtaatcccatgcgatggcgccgaacagggcttccatcaaccagcttgttgcgaattcgacggccgagccgacgagcgcggagatgaggaacaccgctatggcgttcgagttcgaaaatcggctggcaacgatggtgaggatgacggcgccggttccgtagatgggggagaacggtccccagacaagccccgcacggctttcgtatccgccgaagacgatggcgtggtatacggtttctacaaggagccccgcaatcgatccgatgacgaaaagccagaacagcaacggagcgttgatcgatgtcgaagacgtttcgtttcgttgtgtcgtcgcgacggtttccatggcgggctccttttggcgtggtttgtttttcgtgctgcaaccatgatccgaaatcgagattcggaaatcgtcaaggcagtgttaggaaatcattaagcttttcgcgcgccgcgcgccgctgttccgatgcgctccgaggctcgcctccgttcggcccttgcggcaagctcctctgcaaggcgcgggattcgcctccctgaaaaacgggtatcatattcttggacgaaggggattgctttgccagacgaagaacagcacaccgataagaagggcttcctcgaagcccttttctgccatatcatctgggggctcatgcccatctactggaagctggtttcgggggtgcccgcgtttcaggtgcttgcatggcgcatggtgtgggcggcggtgttcgtcatcgcgttgtgcgtgctcgtgaagcgcgttcggtttctgtatctcgcacgcgatgcccgcgctttgaggacgtttttcgcatcggggctcatcgtttcgctgaactggggaatctatgtgtgggcggttaacagcgggcatgtgctcgaaacgagcattggctattacctgtgccctttggcgaacattttctgcggcatcgtcgtgttcaaggaacgcttgacgccggggcagaagctcgcgacggcccttgcggcgataggcgttgcgtttttcatcgcggcgcacggcggagcgatatggatatcgtttgctttggcgatcacgttctcgatatacggaacggtgaagaagcgcggcgggtatcctgcgctgccaggaatggcgctcgaatcgcttctcacgggcgttataggcgtcgccatcctggcgatcggagctgcgtttcctgcgatatggcagttcacgcctgcaatgccttcggccacggcggtttccgaccccggcctgctcgccgccctgcttgcgggcgccggcgtgttgacggcagttccgctgctgctcttttcggctgcggccaaccgcgtttcgatgacgatcctcgggttcatgcagtacatcggtccaacgctcgcattgctttccgccgtttttctgttcggcgaagaattcacgttcgcgcatgcggtttgctttgcgttcgtgtgggcgggcatcgccatcgcgagcatcgagccgctcgtccgcagggcaaggcgagatcgcgcgggaagcgcgtagcgcgcggcaaggttgctgcgggcgcgctggctgcgtatggcgtacggcgtgccggagccgtcgtttgtgggtatttcgttgttgccgttgacttggagtgcgctccaggggtttcaatgggtcaaacgaaatcactgaaggcgaaagacgaggacatggaaaaacgagcattgggtagaaccggcatcgaggtgagcgttgtcggcattggaggcgagggcttcgagggcaaacccctctctgcgtgcgaggagatcatcgatcgggcgtttgccggcggtatcaacttcatcgacgtgtacaattcgaacccaatcatgcgcagcaacgtcgggcgggcgctttcgcactatccgcgcgaaagcttcgtcgtcgaagggcacatcggctcggcgtggaaggacgggcaatacttccggacgcgcgatatggacgtgtgccgcgcgtcgtttcaagatcttctcgaacgcatgcagctcgattacgtcgatgtcggcatgatccactacgtcgatgaacgcgaagacttcgatgcggttttcaacggagatctgctcgagtacgctcaagagctcaaagcgtcgggggccatccgttgcatcggcctttcaacgcacaacaccgacatcgcgattgcggccgcccgaacgggcattgtcgatgtgatcctcttcagcgtcaaccctgcctacgatatgattcccgccaccgatgatgtgaactccctcttctccgaagaaacgtacgatcgcgatttcacgggaatcgatgccgggcgcgaagagctgtatcgtctatgcgaaaccgagggggtggcgattacggttatgaaagcgctcggcgcaggcatgttgctcgatgaggcgcgctcgccattcggcgcggctctgacgcccgcgcagtgcatccactactgcctgacgcggcccgcggttgcttccgtgccggtgggtttggcctcgatcgagcaggttgacgcggcactcgcctatgcggatgccaccgatgaggagagggactacagcgaagtgatcgcgggcggaccccgaagctcgatcgaaggcgattgcatgtattgcggccattgcgcgccgtgcacgagcggaatcaatatcgctcaagtaaacaagttcgtcgacctcgctcttccgcagggcttcgttcccgatacgctgcgcgatcattacctgctgctcgaccatcgggcaagcgagtgcgtcgaatgcggcgcctgcgagccgaattgtccgtttggcgtgggcatcatcgataagatgcgcgtcgcagccgacctgttcgaataggaggcggatatggaaggtgcgaacacggcgcaatcgctcgctcagcgcgccgcattgcatcacggaagcgacttcgtaataatggcatgcatggataaccatcggacagaagcggggccgagcgctctttccttcgatgcgcatgtgcgctacgggcttgcgttttcaggcggctgcgattcgtcgtatcttcttgccgagatgacgagggcgggagtcgacgtgaaggcgtacatggtcaaaacggcattccaggcggcgttcgaggtcgatgatgcccgccgcgtcgtcgatgaactcgatgccgatttcgagttgatagaagccgatgtgctgtcgcgcgatgagatatgctcgaatccgtgggatcgctgctaccgatgcaagcgtttcatcttcggcaccgtgcttgaccgcatggcgcgcgacggtcggacggtgcttgtcgacgggacgaatgcgagcgatgatcccgcgcgccgtccagggttcagggcgcttgaggaactcggcgtgatctccccgcttcgcgaagcgggtttgaccaaagacgacatccgtgcccgttcgtggacgatcgggctgtcaaccgccgacaagccgaatttttcgtgctatgcgaccagggtttccgaaggcacgcggataacgcaggacgagctcgatcgcgtagcgctgaaattgggacatcgaatggattcggcagggcttggcgacaccgcagattcccgcgagaaagaagggcgatagctcatggagcaaaaagatttgaggcacctgcttgcgcaggttgccgaaggaagcgtgtcgcccgacgaggcggctcatgcgcttaaggttgctccggtaaccgagctcggatatgccgccgtcgacaatcatcggggcatacggcagggcgtttccgaagtcatttacggcgagggaaagacggccgagcagattgcgggcatctgccaggcgatgctcgaagcgggccaggagcggattcttatcacgcgcctcgacgaagacaaggccgttgcggtggccgaccgcctgcattcccagggcgacgatgccccctcgctcgactaccgcgcgatcgcccgaataggcatcgtgggtgcggctcccgaagcggatgggaacgggaccgtggtcgttgcggcggcgggcacgagcgatttgttcgtcgcggaagaggcggcgatcacggcggagatgctcggcaacgatgttgtgcgtctctacgacgtgggcgttgcaggcatccaccgtctgctttcccatgccgacgagatcgccgatgcgaacgtcgtcgtggcggttgccggcatggagggcgctcttgcgagcgttgtcggaggcatggcgtcgtgcccggttatcgccgttccgacaagcgtcggctacggtgcgagcttcgggggagtggcggcgctgctcgccatgctcaactcgtgcgcgagcggcgtgtcggtggtgaacatcgacaacggcttcggtgccgggtaccaggcgcatatgatcaatcacgtgaaagcgggcaaatagatggaacagctgcatttcgactttaccaaaacagcgcgcaggcaggcgattctcgacgagctgttcacgctcttgccgtccgatcgcaggaccgtgatcgcgaagcgcgcaacgcaggcgggcgttcccgatcgccatcatcacgatctgggcgaggtgctttcgacgatagacgcgcttgcggtaagcgagcgcgtcaagcgggatatgcgcgcgatctaccggatccttgccgaagccgaggcaacggcgcacggttgcgccgtcgatgagacccatttccatgaggtcggcaatggcgaagcgatagagaacgttctcggcatagcgcttgcgatcgaagcgctcgatcccgatgagatcacggcgactcccgtgcaggtaggcagtggaacggtgcggtgcgcccacggggagcttgccattcccgctcctgccacggcggcgatcatcgcgcgcggcattcccgtgtgcgaggaaaagctcgacggagagctttgcacgcccacttcggcggccgtgatctgccatttcgtcgatcggttcgagtaggcgggaagcccgcgatgcgatctgcggggattttgtttccttggcgatttgcttttcgtatggatgcttctcaggtatcatatgctgcgaaaaagtaatccgcatattacttaatgcatgcatcgaacagcgcgaccagagcggcgcgctgctggaaaggaaccattgtgggaatgcagatgctttcgctgctcggtgtgaacttcgacgggccgtacctcgcaatcgacgatttagaggcggggacgcgcactgttttcgccatcgaggggcagacgtttacgatctcgaagcatccggagcgatattgcgtgggagcctacgacctcatgacgcaggagcgcacgatgtgcgaaaaccgccaagagcttcccccggattacaaggaaacgtcgtgtccggcgtgcgccgataagactggcttcaacccctcgttctacaacgggggaggaatctccgcgcagcagcgcgcctacaacgatacgccgcacatcgtgtacctggcgtatttttcgcctcggcatctgaaggtcgggatcacttccgctgcgcgcggcgagctcagattgctcgaacagggcgcccgatcggcgatgattctcaaagaatgcgccaccgcctatgccgctcgcgaatgggaggcgaagctttgctcgattcccggcatttacgaaagcctgcgcgcaagcgaaaagtaccggttgctcacctcggaggcgcatgatcccgccgaggcggcggcgctcatgagaaggacggtgcgggaaacgttttccatggatccgacggagccgatcaacctcgatcgctactacagtcgtgatgcgtcggtgctctcctgcgcgatcaacgagccggacaatccttcggatgcgatggttgcaggcacgtgcgttggcatggtgggcacgattgcgcttatggagcaacagggaagggtgtacgccgtctcacttaaagattacgtggcgcatcgcatcgattatcggcccgatgaggttctttacgagtattcggcgcctcccgagcagggctccctcttctaaactccgttcgcgcaccagcatatatgtgctgcctgtgatgcctttatgacgcaaatgcaacggcattggtatcataaaggacaattagtactaattagtgataaattagcagcagagcaaaaggaaggtatcggaagacaccggaaggcggaatcgatggaagaggcgaaacatcagcacggcgcgccgatgcggaacctatctgtccggcgcgagcggctcgacggcatgttggtcatcgccttgagcagaagctacgagactgcgcatcggaagagcaaaaggctggttgcagaatacgggctcacgttctcccaattcgaggttatggaagcccttctgcacaaaggtccgcttaccgtgaatgcgattgtcgaggcggtcctttcaacggggggaaacatcacggttgtggtgcgaaacctcgaaaagcgaggatacgttcggcgctcgacgaatcctgaagacggaagatcgttcatcgtcgatcttaccgacgaaggacgtgcggtcatagaagagctgttcccgcgccatatggagttgctcgacgaagcgctggcggcattgagcgatggcgatatcgaaacggtcgtaggcttgctcagaaaagtcgggcatgcagacgacgaaaggaaggcacatcatgattaaggtgatagatcataacaaaatgggcaagagcgagcgcggatggctgcacagcttgtttcacttctcgtttgccgagtactacaatcccaacaacatccaattcggcgcactgcgcgtagtgaacgacgacgtgttcgatccccaaggcggatttccgacccatcctcacagcgacatggagattatcagttacgtcgtagacggggagctgacgcacaaagacagcctgggcaatggccgcacgctgaccaagggtcaggttcagtacatgagcgcaggcaagggcattcttcacagcgaattcaactatgcggaaaagccctcgcgtttcttgcagatatggattcttcccgatgcggcaggatacgagcccgcatacggcgattacgatttcaagtgggaggatcgcgagaatacctggctccagattgcctcggggaaaaagggttccgccccagtgaagatcaaccaggatatgaacgtttcggttatcagcctcgacgccgggaaggaagctgcgtatgaactgccggcgggccgtcaggcctacctcatccagatagagggcctgggttcggtgaacgggcatgcgcttcaggagcgagatgcggccgagatcaccggagagagccagatagttctctccgcaacgaggaactcgcactacatcctgttcgatatgaaacaggaataagggcctcgccgctgccggcccccgagtcggcagcgcgccacggcggcgcaggctggctgccccaagcccagtttcgcaccgccatggcgcgctcgaaacgcgcgagaagcttatccgatcggcgtctctgctcttttgggttcttacgtcactgttgctatcctcctctgtacgggcgggcatggcgccgataacgagggcctcgatccctatccggatcgaggccctatttcgtttccaaaccctttaggagccaaattcccagttcaacgatatcaccgtaaaacggtgatattggatgggcgatgcctttcaggcgattgcggtgatgctgcggcgcctcgttcttcccacaatcgagctatccgaaacgtttcggatttcaggagtcgtgcagggtgctggcattctgcacgagcggaagagatcgactagagggagttgtcaatgagcaaagagggaatgagccgtcgaggattcttacgcggtgctgcgctgacgggagcgggcgtgctgatggcgggcgctgcggttggttgcagcccgaaggcggcagaatcgggagccgcaaatgccgagacggtgtcgggaggcggtgcttctcccgcccatcgctggcaaagcgaagctgcggcggcgtggcgcacgccgatcgatccgattgcggacgaccagatcgccgacggcggaacattcgatgtcgtggtcgtcggcggcggccagtcgggcacctggtgcgcgcgttctgcttcgatgaacggtgcaagcgttgcggtgctcgaaacccagtcagaggctgacttcctgtacgttggcggggaggtcggcacggttaactgccaatgggcgctcgagcacggtgcaacggagatcgatagggaagacttcatgaatgaactgttccgccgcaatgcgggacgctcaaaccagcggttgatccgcgactacgtataccattcgggcgaatatctcgactgggcgcttgaagacctcgacgaccccgactggcttaacgatccggcgaacgtccatgttttcagcgccgatcattccgagaacatggtaatggatccgtctggctacaaatactatcttggaaccgtcaacttcaggcccgccgccgaaacaggagctccaacatggaactggggcgaaaaggttatgaagcatcacagggacaaggcgatcgaggacggaactcagtggaactgggcatacagggctttgtacctcgagaaggacgattcgggcaggatagccgccgtcatcgcccaaaagctcgatgatgagacctaccatcggttcacggcgaacaaaggcgttgttttggctgccggcgatttttcggccgatgaggacatgctgcgggacatcaacgacgagtaccgccatcttgccgagtcgtacggcaacatcgaagcggcggctgcgggctcgatgttcggcgttcgcaacggcgatggcttgaagatgggcgtgtgggcaggcggccatgttgaagtgggtccgcgtgcgggaatgaacacggggcaggttggaaccggcgctccgtggggccccggttttgttatcttgaaccaaagcggcaggcgcttttgcgacgaatgcgcgggaggggccgagggggctggctacatgattccccgtcagccaagaggatacgtcgtgtccattgcggatgcgaattggcgcgaggtcgtagagaagatgcctccatgccacggcggcatcgaccagacaaacggcgtttcttacaacagcctcgagtcgaatgcggcgaaaatcgatgcagcgcagccgagcagcgaagctgacgaaaacgggctgttctgcgcaaacacgcttgaagagcttctggatgcgatcgggatctacgatgatgatcagaaggcgacggcgttggccgaactcgaacgtttcaacgggttcgccgcaaacgggaaagatgaagacttcgccatggatccccgtattctcaaggcgctcgatacgccgcctttctacgcgacggtggccgcgtcggatgcgatcagcatggggttgtgccagacggctggcttggatatcagctccgaacacgaggttcttgacgaaatgctggcgccgatgcccggcctctattcgatcggcaataactccggcaaccgatacattgtgaactacgcgacgccgcttagcggtatgagcctgggtttttgcctaaccgagggcatgacgcttggaaagaagcttgccgaggcctgatgccgctgcagcgctttgcaaggttgacggaaatcggcggcgggacgttctcgccgccgatcgttttacctgtataatggccgcatgaaacagatagcacggaatatcggatattcctttatagcggcgtgggtatacattctctttaacggggtgctgcttttcccagcgatcgagccgaccgcgtttgtatcgagcacccatatcgtctcaagcctttcaacggggctggccggtctcgttttggcgttgctgtccgtgaagctcttttctctggagcgtcatcgggaaatcgtttaccttgccggtatcgtcggtgcggcggggacgtgctgcatcgcacttgcgggttctgggtttttggcggccgagtggatgtcgatcggatatttgcttgtcggcatcggcatggctggcttgaaatgcgcgtggcaggaaagactgatctgccaaggacggcaggcgaccgtgttcagccttgcggtattcacctgtctcggcgccgggttgtgcctcgtcatcagcgcgttgcctttcgaaatcgctttgccgatcgcttccgttcttcccgttcttgcggctttctttctgctggtgaagcccgtgcagcaagaagatggagcgcatggttcaaggggcgtcgagtcgatggggtccgatgacgcgcaggtcataacgatcggtgattcgtttcttcatgcgccggtgaggctgtttgctgttatcgccctcatgtcgtttgcctacggttcggttcgaactttggggattctcgacggcgccctcgtgcagttcggcaatgattttctgctctcagtgggttgtccggtgattgccaccgtctccgctacgctcgttgttttctacgcccgcaaattcgatacggctgtcgtgttctatatcgcgctgcccatcatggctgccgtgtcgttgattccgcttgcgggcaatcctgtgcttggagccgcagctcatggaatcgcgtcgttcggattcgagctgattctgacgcttgcgctgttccttatcatggacagcgttgcagccaagagaatccacgctttgttcggagtgggtttgttgtggttcagccatatgatcggtacggcattgggccagatcgtgagcgaatcgatttccgatcagacgatgataaccatcctgactctggttctgctccttttcgcggcactcgtcgtcatgggaggtgcgcctcgtttcaccatcgcgccgtcttcttcgggggagcgcgaccccgaccgttccggctctgcgggaagagccggagacgggcggctgggaagcatcgctcttttggccgaaaaatacggattgtctgctcgcgaaaccgagatcctcgaactgtgggggacggggcatacgagcgcttttatcgaagagaagctgttcatctcgaagaacacggtgaagacgcacttaagtcatatttatgcgaaggtcggagtgtcgagcaaagaggatcttcttcagatggtcgaaggccacgacgaggatcggtgagcgcgcatcgccgtcccgttgactcgatgccgccgacgcgttcgaatagtgcggacgccggcgttttccctgatcgcagatttcgagacgtcgcgatacgcagcgaattttttcgcacgaagcctgtgcgcgcttacgattgcatcggctttgcggggtatttcagcatctcgtcgatcgtgacgaacgtgtagccctgctctttcaagtaggggatcgcctccctgattgcggcgatcgtctgcgaacggtcgccgcctctatcgtggcagaggatcacggctccgggccatgcaccctcgatctgcgcggcgatcgaatcggcaccgggcaagcgccaatcgctgctgtcgatgttccacccgatctctgcggagatgtaaggcgcaaggttcttctgcacatcggcgttgaagtttccgcctggtgtgcggatgaccgtgctcggcttttcgccgatggccgcttcgatggcatcgtagcctttggtaacctcttcgatctgctgctctgccgacatgagtccgaggtcgacgccgtttccgtcgccgcttgcgtgatcgaacgtatgggtgcatatctggtggccttcttcatgggcgcgcttgacgagggccttgccgttgtcgtcgattctattgccgacggtgaagaaggtggctttcacatcgttttctgcgaggatgtcgagcacctctccggtggagtcgggccaggggccgtcgtcgaacgtgagggcgaccaccttgtcgtcgccggtatcggggtagtattggcggcagaccggattttgcggtgcaatatcctcgacgaaggtcttgcccgagatatcgccgatctttgtggttttgcttccgtcgacgcccttcccctcgattacgtgcaaggggccgtttccttcctggatcacttcgtagggaaccgtttcgacggtgtcttgcgatggttcgaccgcgtttgccccgtcggcgacgattaccacgtcgcctgctttcaaattcgttttggggtcgttggtcttcttgctgttgacgtaggcggtgaacgcctcgcccttgcccgcttcaaggacctcgccgtcaacggcgacgaaatcgccggttttcggagaggcgtagcccgcctcgatgatcgcggcgatatccttgcttccgcccagctcgagctgctctccgttgacgatcaccgagatgggtctgctctgaacgaagatgacgattccgattacgatgcaggcaagaacggcgatgccgataagggcgggcttcacgggaagcgatgtgctgcggttggcctttttgagataccgatcgtcgttggcatagcgggcgttcgcgcgcggcgcatgctgctggcgcgttggccccggctggcgctcgtttcgtccggtgacgcctgaatgggcaggacgggaagcccgatcggcctgaacgcgctttctgtatgcatcggcatctctgccgtaaggcgttgcttcgggttgggggcggtatgatcctgtttgccgtgacgcgtgggccgagcggtcggcagcgctgccgcttcttcgctcggggcgtccgtcaacggtgaaccgggctgtagcgggggagcgatactcctgcccgcgccctgatggggcgtggccttgggggcgattctgcggcgtttctggcatcgttcggctcgatcctgacgaacagctcggcgagcttttcttttcctgcaataagtatagacgatggtttcgcatgcatccacatcagccattctacctgaaaattgtatgaaggtcgcgaggggaacaacgaaccgtttatacttgttgcttcgaatgagaaaggaaccggtatggggttacagcttacggtcgcgcgtggaataagcgctttgagcacctgggggctcaaaaacgtgttcaggcgaccggcggcgaactttccgggaaagatcgctctctacgtcgatccccatcttattgcagatctgtcggggaagctcggcgaaggctcgatcgtcgtcgttggaacgaatgggaaaacgaccgtcaccaatctgattgccgacgctcttgaggcagcgggcatgtcggtgatctgcaaccgcacgggcgccaatctcgatagtggcgtggcgacggcgctgctgcacggaaagcgatccgattggggcgttttcgagagcgatgagctgtggctcgccaaggtgcttccgcagcttcaggcgaattacctggtgcttctgaaccttttccgcgatcagcttgatcgcgttggcgaaatcgaccgcattcaagacagcatcgttcaaacgctgggcaaatctccgaacaccgtgctcgtgtacaacgccgacgacccgttgtgcgaggctatagccttgcaagcggccgccttaccggggcgcgaggcaaccgagcagatttcgttcgggctcgtcgaggacatgggccttccccaaaacaccgtcgccgacgcgcagatgtgccagcagtgctcgtcgatgctcgaatacggctatcggcaatacgggcagctgggggcgtatcggtgccctgcctgcggattcgagcgtcctgcgctcgactatgcggcagacgatatcgagctggacgccgaccgcttgtcgtttcgcttgcgcgggccgctcctttcggggcctggcttcgcgtccgaatcagcccgtgtatcggcatcgcggcaatccgaatcggcgcttggcgcccgatcggactcttcgagccagcagccatccgaagcggcgtgcgcacgcgagcgcatagtgcatgctccgctgagcggcgcatacatggtgtacaaccttgcggcggttgcggtggcagctgggcttgccggctgttccgacgaagcgcttcaacgggcgatcgatgcgttcgacccgcagaacggaaggctcgaaaggcttgaggcgggcgggcggcccatccttttgaatctggcgaagaacccaaccggcttcaatcagaacctgcgaatcatcgctcaggacgaaggtccccgcgcggtggcgttcttcgtgaacgacaaggaaggcgacggaagggacgtctcgtggatttgggatatcgacttcgaagagctcgccgatgccgatgatcttgtcgtcttcgcaggcggcatccgtaaaaacgatttgcaggtgcgcctcaaatacgcgggaatcgaatcggagctgattgacggccctgccgacatgctcgatcgcacgaaggggctttcccgcgaatacagctactatctgattgcaaactatacggccctgcccgtcgtgcgcggcgaactcatgcgcatgatcgagcaggatggcggcaccgaagagaggaaggcgtgagaccgtggacgctttgaggatcgcgcacctgttccccgatttgctcaatctgtacggcgacggcggcaacgtgaagtgcctggcaaagcgtgccgagtggcggggtctgcccgtcgaggtcgtctcggtcaatcacggtgaagaaatcgacttggcgacgatcgatatcgttttccttggcggcgggcccgatcgcgaacagcggctcgcttccaagcagctgctgcgcatgcgcgatgcgctcaaacaatacgtcgaagcagatggcgttttgcttgccatctgcggcggctaccagattctcggcaacgaatggcttctcggcgatgagagcgtcgagggattgggcatcgtcgacatggttacgaaacgcgtcgaagccggtcccgatcgtctcatcgacaacatcgtgttgcgctcgccgttggctgaccggcctgtggtgggctacgagaaccatgcgggcagaacgtttctcgggcagggcctcgcgccgttcggcacggttgtctccccgatgggccacggcaacaacgatgccgacaaggtcgatggcgtgcggtaccgcaatgtcgtgggcacgtatcttcacggccctttgctgggcaagaaccccgaggttgccgattggctgatcggccgggcgttcgaaacgagggcatcttgcacgggggcgcccatcgagccgctcggtgcgcttgacgattcggtggagattgcagcgaacgaatacatggctaaaaggctgggcacgcgataggaaacggctcggttacgggttctgcgcaggggtggatgttgtgcgcatttcatgtaccgctaatgcttctgcaaaagaagcattagatcttctcccaatcgtgcatcgtttctcgtacctgctgatgaaagccttgtttgcagcaatgtaaaccgcggtttcggtgaaatcatcctatggcgttttcctaaaaacgggcaattcgtcttgcgttgaaagcgaagtgtcgggcacaatgtttggcatgatggatagaaaaagcaacgcacggcgccgaagcgcccccgttgatgctgatcgtcaaaggaaggcccaccgcggtgcaagcgacggaccgtcccgctacgatagtttcgacccctctgcttacggaaggcagccttcctacagccactattcccgcacacccgaaaccggagacggcgacgcaggctctgccgaaagcggttacagccgccgcgtctcccaagccgaatatacccgtcagcgcaagaagcgcaagcgccgcaagatagtcgctgtggtggcagcggtcgttctcgtagtatgcctggggggagcgggcgttgcgttcgcctacctccatacggtgtccgcgaatctgagcgatggtatcgatggagacctgcgcgctcagcttgtggagaccgatctcgcgaacgagccgttctacatgttgctcatggggaccgacggttcggccgagcgcgaagcgtcggacgaatacgcaaacgatccaacccgctccgatagcatcatccttgcgcgcatcgacgcgcccaaccataaggtcaccctcgtttcgatccaccgcgatacgctcatcgacatgggggagtacggccaaaacaagctcaatgccgcttacgccatcggcgggccggccatggcggtcgagaccgtctcgaagcttgcaggggttcccatctcccactatgccgaaatcaacttcgatggcttccgcgatatcgtgaacgcgctgggcggcgttgaggtcgaggtgcccatggagatcgacgactacgatgcgggcggccatctggatcagggcctgcaaaccctgaacggcgatcaggcgctgattctgtgccgcgcgcggcacgcctacgacgattacggcgacggcgattcgtacagggcggccaaccagcgccttgtgcttggcgccatcgcgaagaagatccttgcatccgatatcggcaccatggccgataccgtgagcgcgctttccgagtacgtgaccaccgacctcagcgtattcgacatcatcggacttgcgcaggccatgcagggcctcgatccttcgaccgacctctattccgcaatggagccgacgacttctgcctacgtggatggcggttggtacgagtatacgaacatgacggcgtggaaggaaatgatgagccgtgtggatcagggccttcctccgacgaccgaagatgtggtcgatgagctgtcgggaacggtgctcgccagcacgggcagcggagatacgggtgcgaccggctcgacggatgggcagaccatcacggagccgaagaccggcttcgtggccatcaggaacggcaacggcatcgagggagccgcaaatgaggcggccgaaaagctcgaagatgtcggctatacgatagaaacgggcaacgccgacggcttcgactactcgcagaccatcgtcatctacaactacgcgaaccaggccaacgaggccaaagaaatcgccacgaccatcggcgtcggcaaggcgcagctcaacgacgggacgtattcgttctcaggcgatttcctcgttgttttgggcgctgactgggggtaaccgttcgagcatagcggcctcacccgccttcctcacctgttctagatgagagaaatcccgggcaatcgacctatagtagcgatcgcattctaggtcgttctcaaggaggtccgccgtgggggaagcaaagcggggcggcaagttttttgcccgtggatggtttatggtgctggtcgttttcatcacggttatcgtgacgcaagggttcagcctttattcgttcagcatgatcaaggttcccttgaccgagatgctcggagccgatccgacgcaggtggccatgggcttttccatgtatgtgctcgtcgtggggttcgcaagcctgatcgtcggcgacatcatcgacaagatcggtctcaagcggacgcttatcctttcggccgtcatctattcgagcggctacttcatcatcggcacgctcgattcgctgtggatgctttacgtcgcgtatttcatcatgggcttcggaaacgccctcggcggcatggttatcgattcgggcataccttcgaactggttcgtgaaaagccgtgggcttgccgtgggcatcatcatgagcgcgatgttccccggttctcttgtggcaaccaacctcgtgtcctttttcgcgtcgagcggcaattggcagatggcgtgcatcgtcatgggcgtgctctcgttcgtggttctgttcgtttcggcgttcatcctcaaatggcgcccgcaggatgtggggcttcttcccgatggcatgaccgaggaagaagcggcgcagaccgccgaccaggcggctgcggcgaagctgatcggcctcaaccgcaagcaggcgttccgcacgggaacgttctggctgctgttcgccgccttcgcgctcatcggcatcggagagcaggggccgttccagaatatgccgacgtacctcatggccaacgggctcgatcttgcggcggcgggctcgttcatgtcgttccttgcatttgcaggcgtgtgcggcaagcttacctcgggtgtcgtcgtcgataagatcggaccgcggctcgcctaccccttcatcaacttccttgccgcagcggggctcgtgatcatactcgtgggcggcggcaacatggttgcgctttacgtgggcgggttctgcttcggtgcggcgctcagctcttcgaccgtgtgcttttcgacggccacggcaaagtacctcggaccgaaattttacgcgcagctctacgggatcatctacatgggcaagcccgtcatggatgcggtgggcgttcctctggttgccaacgtatcggaaagcgccctgggctggacgggggcgttcgccatcgcgatcttcttcatcgtcgcatcggccgtttgcatgctgctggccaagaagaacaagcagctggtggctatggagagggaagcgacgaggcagcttgtcgaagacagggaggagacgcgcgagcctgcttccctcacgtgagcaggagcttgccggcagcctctacgaggcctttccggttgctgacgccgagtttggcgtagatgctgcttcgatgggtgtgcgcggtgttttcggatatgccgagcgatcgggcgacttccttgttgctgtagcctgcgacgagaagcttgcatacatcggattccctttcggtgagaggggaaaccgctttggccgacagccattgcggatcgggggcttgcgcgtttcgtacgcggtcggcgatggttcgcgcgagttcgcgctcctgctcgggcagagcgctgctctttggaaagcgttcaagcaaaggaatgatcggggatccctcgtcgagaaacggttggatgatgcgttcttccgaagcgagttcgagtgcggtgcgcatggacgcgagcgcgctgtctttgcgccccgatgctccgaggatcatggcccggtagacaagtgcggaaagaagcgttccgtttttccgggtttcggaggagtcggctatcaggctgttcagatcggcgagagcctcatcggtttttccgtacgcatgcttgacccgcgctcgcgcgagcaccacaaggtctgcaagggtgccgtcttcgtcgtctgcggaaacatcgcagtcgatcatccaccggtaagcggaggccttctgccccgcatcgagctgaatgcgggcgaggtatgcgctggcaacgagcacggaacgcttcgcctgcttttctccgccggagccgatcgcctcatgcaaagtcgcctggctggcggtgtactcgccgcgcgatctttgaaccagggcgagcgcgatagctgcatcgatgtagaattcggtccctttgctgcgcgaaaggatgcgcctgctctcgtcgagcacctcgacggcgcggtcgaaatcgccgcgcttgtagaagatcatgccgatgatcacgttgccgagctgcgttaagatgttttgcttggtgtcgaaggcgccccggtgggacgccgctttcagcccgacctcttcggcaagcgcaagggcgccgatgtcgatgtagtgccgtgcgagaaagtaaaggttgatcaagtacgacgtgacgttgccggtgctctttgcaaccgtcacgcattcccgcagtatggatatggcttcgccggggtttttcgcacgcgctgccgaggcccctgcagcggtgtatacccagctcctgagaaaccgatcgtcgccgatgccctctttcggcagcttgttgatgatgcttcttccctcgaccactttgccgctctgtccggcgcaggtcgccttcagggcaaggcattcggcgcggagccgatcgcggtccggatcgcggtaggccgacccgttgacggacagcagtcgttcggcaacgcgcacgtaatagagcgcctcctgcgggctgtccgagccgatcagcgcaaaagcttgcgcgagattgatgcgggggcttgagccgaaatgagacctcggcaggttttgcagcgccttcgacaggagcttgaatctgctctggttcgcgaatgccatgtaattcttctcgataagccaggcgacgcgatcccattctttcgatgcgcaggcgtgaacaagcgcgtcgcctggcatgttgtaccgttcgaaccagttgctcgcgcgggcatggagccgcttctgttcggatagatcgcatcgggaaaaggcttttctaagggcttccgcccagggggaccgataggcgaaccagccgttgccgcgcgcaaggggttcgagaacgaggttctctctctgcagcgcttcgatcacggtttcgctgtcggagcgctcgagcacgtagtcgcacagcggcgcgcacatcttgcgcaaaaacgatgtgctgacaaggaaatccctgctcggcgaaggcagcgctgcaagcaggtcgtctaccaggaacgcgaccggagagctgtggaaggcgctgggatcgggcaggatgccgatcgggttttcgtgggctttgagagccgccgatgcaagccgaacgccggcaggccatccgttgacggtctcgtagaggcgctcgaactcgtctctgaacccgggcgagcctttctcctgatcgctcggagaaaaaagaagctcggcctcgtccttgtcgaatcgcaggtcgttgtggtcgatcgcgaggatctggccgcgtgcgataagcgattcggtggagaggggcgggatggttctgctgctgatcgcaatgcgcaggccgcgaggcgcgttgcgcaggaagtacttgaacgaagcgtgtatctcggcattgtcgatgacgtgatagtcatcgatgatcagcacccatgaggccttgttcgctttgcgatgtgcggcttcgaggccgtttattatcgcgtcgacgaagtagtcgtcgcccttgtcggcgttcgaagagagcgcatttgccgtaaggctcctgaagtcggggacgaaaggttcgagggcggcaacgaggtagttccagaagcgggcgggatcgttgtcgatctcgtcgagggtcagccaggatacgctcggtcggccggcttgcgattcgatgatcgatttccacgatgaaagcagcgttgttttcccgaatccgctcggagcgatcgtcatgatggcctttttgtccgcgtaatcggacaatcgctcgatcagggaggtgcgagcaaccaggtcgctcggaaccggtggagcctcgaatttggttgcagccaatgtgcgaccgtcgatgatggttgtatccgcgcagcccatggcggccttctccctgctttcaagaaaacagcacgctcgtttcgtatgggaaccatactaccacgatcgcctgtcgggtgaatgcagcgaagggcttgcccggcggaggccgcgagggcaaacggaaagctccggcgcaacccgatcggcgatcggtgccggagcttcgagggagagccgaagcctcagatatcggcttcggctcttgcgttttcggattgcgatccgaagcgtgccagcgggctttacgcctgggtggtcgcttcgatgtcctttccggcggcgttcatgccggcaaggcgtccgaaggaaagcgcggtgccgagcgagatgcccgcaacggtgacgggatactcgacgaggtagcggccgccctggacgttgccggttgcgtagaggccctcgatcggctcgcccgcgtcgttgaggggctggagcttcttgttgacttcgaggccgcccatgagcacgagcatgccggcgctgccaaacggatacgcgaaaaacggcggctcggatatggggaacaggcgacggggatccttgccgaaatcgctgtcatggcctgcggcgcacatctcgttgtagcggtcgatggaggcttgcaccgttgcgacgtcgaggcccatctggcttgccaggtcttcgatcgtatcggccttgatcagcccctgggttccttcgaccatttccttggtggtgtatcccagcccgaagcccgcgagcacggtctgatactggtcgatctgatcttcggggatgaagtggttcacgtagccgtggccgtcgggcatgtgggcgatctcgtcgggccacttgctgtcgaagatctgccaggagcgcaggtcttcttgcccggtgagcggattggtgcccacgggaacgcgcgaaagctggtcggcgatgttctgccccgggatatcttcgttcatgaagcggttgccgttgatgtcgagctgcaggtagccgtcgacgccgaggggaccgcccatgtggtgcgtcatcggagcgtggggaccgagctccatgtggcttccggcccacagacccatcaggtgaccgtcgccggtgttgccgatggtgcccgcggcgtccattgtggtatagaagctcacgaactcgttggcccaggggatgaaataatcgcgcatatcctggttgttgccccagtcgcctgtggcaagcacgacggatttggcgttgatctgcgtgtagttgccatccttgtcgtgcacgtaggcgccggtgaccttgccgttgtccacgataagctgttctccccaggtcgagtagatcagctcggcgcccagctcttcggctttcgcggctgcggcgtcaagcgtccactgcatgttcgggttcgtggtgatggtgccgtggaaataggggtagtactcggtcgtgtagtcgtagccttcgagcgcggggaagcacttcgggcggatgtagttgggcttatcggtctgctgatcggctgccgtgctcgtgagcacctcgaaatcagctccttcgatgagccagtcgaagtcctcgccggagtgatcgtaccagtagccgaggaaatcgggggtcgggcgatagcacatgtctttcatgagctggttgacgatgacgtctttgcctgcccattcgatgccgaggtccttctggatctgcgaaccgacgactccgaagtcgccggccatggaaacggcggaaagctcggcggccttctcgacggcgatgactttagcgccctcttcggcggcagcctttgcggcggcgcaacccgagaggccgagtccgatgacgagcacgtcgcagtctttcgtttccttgatgtcggtcggaacgctcggcgccgacatgaagttcggcgtgaaatccgccggcttgccggacgcggcgccgccttgcgcggctccgtcagcggcagcgtcggtcttgccggattcggcgttcgatgcgggggcgcaccctacgaggcctgcggcaccggcggcaacggccgcggtggcgcccagtccgagaaacgcgcgtcgacttagtttagcgttgtccataattctccctccagatacattatgggtcgtggaagctcactttttggcttccggatgaggtgcacattacggatgtgcgagtgctttttcatcactagttcgctggtgatttttccgaaaaacgttaaaacgcatcccacctgattctggtgaggcgattaaaaatgagcttctgaactggtaaaatgtagggtatctctagatgatacccgataactcgttgacaggttgcaacgtgcggaggcgcggcaaaccgatatactatgcggatgggagaagggagccgaatgggatacgtggtcgatatcgccaggagcctgcgtctgcgcgacgtggttttcttcggcgggtatgcgctctatctcgttttcagtttcatggcgtttcattcggcaacggtgctttcttcggctggttcgcttggatacgacgttggggttttgttctcgatgggtgcaatggcggcgcgcatcgtcgtgtatcttgcatgcgcattgctcgcccgtcggttcctgcgtttgtcgagtgcggtgtcctctctggtgacgatcggcgtcggaatcgtcggtttcatcgtagcggcgatggtatttcagttctcctccgcggtttcggtcgacatgttcgccccctggcttcttctgggcggcgtgttccttggggcgggggatgctctcatcacgctcatgtgggcgcgattctcttcaacgctgacgctgcgcgcggtgtatctttttgtcgtgctgtgcaatgcggtgagcttggttttctactttgcggtcacgttcgtgcccgctcccgtcgtcttgccccttgcgacgattctcttcgtcgtttcggctgcgttcgcgaaaaagtcgctcgatgcgcggccgcctgtagaggccgagtattcgcgcccggtgttcggcggcgcgatcagggggctctggcatcccgtgctcgggacggtcatcctgtgtttcatgagcggccttatgcttcaaatttcggggcagaacgaaattccactcgaatcgtttcagcagacctctttgtttaccagcgccattgccgtgctgtgcttgctgcttcccgctctgcttataaaaaagccgctcaacgtcggcaggatctacgcgttcgccctgccgctctccgcagcgggctttctgctgctgccgcttatatggaatgcggcgggcggtatcgtgaacgcgttcgctcagctgggggctatggtggcgggcatcattctctggtgcatgctcgccgattcggcccacgataccaagctcccgtcgacgcttttgttcggccttgcccttgcgtgcacgaacatcgcacagcttgccggcacgatcgtcggcttcgttaacgccgaaaccctcaagcagggggatctcgtgctgaccaccgttgcgctcgtgtcggtatacctgttgctgatggccgcgctggtgctgttcaaggacaagaaacttgccagcagggaagaggatcccgcggtgcagctcactcccgaagaggcgctcgcttctcgctgcgatgaaatcgccgcggcgcatcagtttacgccacgcgaaaccgagatattcaagctgcttgcccagggttacaccatgccggtcatctccgaaaagctgttcgtatcggagaacacggtgaaatcccatgtcaagagcatatatcagaagctcggcatccatgttcgcgccgagttgatcgatttggtgaaccagtcgtgatcaggatcaccgttgttgcggtagggaagctcaaagagcgcttctgggccgatgcgtgcagcgaatacctcaaacggctgaaggcgtatgcgaaggtcgaggttcgcgagatctccgatatcgatcctgctaaggcggggggagtggacgcttcccgcgagagggagggggcggcgattcttgctgcggttcccgaagggagccatgcgattctgctcgccatcgagggcaaagagcgttcgagcgagggtttcgcccgccgattggacgacctggcgctttcgggcaaaagcgacatcgcgttcatcatcggcggctctgatggggtgagcgacgccgtgcgagcgcgcgcaaacgagcagatgtcgttcggcccgatcacattgcctcataacctggcccgcgtggtcttgctcgagcaggtgtaccgcgccttcaagatatcgcgcggggagccgtatcataagtagagcacctcgcgccgcttgccgcgcgagtgcgaatgcggcgagcgcgggcgcggacgtcgtgcgaggggcgcaggcgcgcgaccgtgcgagaacggcgccgcgagcgagcgatgccgcgagcgagatgcgccgtgtgggagcagtctgtcgcatccgaccctgggttagccgcgcaggcgcgggacgcttgcttcaagtgcgccgaaaataggttgtatattcccctggcacaaaagtgagttttggcatggttttttcgacggaagcccgtagctatttaacatattcgcaggtcaattattttattgataaaataaaccatgccaaaactcacttttgtgccagggatcggggtgcgatattcctcttgaacctatcttcaagattcctgccgcacctctggtcggaggccagaatgcacacttttccccgatctgttacgtttgaggcttatcttgcgggtctttccgtcgcgctgtttttagcgacctgggaaaactttcgtagcttagctgcgaaagaagcccgaagttgcttctggttgcttcgagcgcaacagatcggggaaaagtgtgcatattaaggccttccctttttctgtgatggcttgttagcgttgcccccgctgctgcagtatcggcggatcgaggatcggtctcgggccgctggatggagccgtgaccggcattgagccgctgggcaggtgacggcgcggagctggcctgcccagcggcttgggagtttgcgtcgggcggggacgcgctccagggatccggtttcggagtgcagccccgccccgaaaccggatgtgcggtttagccgaacagggcctgggcgatggcgtacccttcgccctgcacgccgatgccgcagcttccgagggtggtctcgccgatggcgtggaggccttcgatgcggttgccggcttcgtcgagcaccgtgtagtcggtggtcgaatcgacgagcaggccgcccactgtgatgtgcatggcccaggtgcgcggcgatgcgtagaacggcgggttctcgatggggctgtgctcggtgaagttcgtgcgcccgaaatcgaggtcttcgcctgtgcgggcgtactcgttgtagcgctcgatctcttcggtgaacgtttgcgcgtcgacgcccatgagccccgcgagttcctcaagcgtgtcggcgcgataaagctggccctggttgataaggttctcgacgttgcgtccgtagcggttgacctcgccgtcgatccagcaagtgtctttgtcgctgatcatgaacatcatctgatcgggttgggccatgatgtgctcggtcatcgtgaagcggtcgagcacctcgttcatgaatcgcttgccttccttgttgatgatcgggcagtcgatatcgtcgccgacggtcgtctcgtcggtcgagttcttgcaatccgcgaaggggaagggcatctgcgtgtccatggcagccgttgtgccgccgacggcgagcgccatcttgataccgtctccggtatggccgaacgcgttggtggtggggatgatttgcttaggatcccaatcccagcgcgtgttgtactcgcgcagcatctcggggctgcccgagaatccgccggtggcgaggatgacgcctttctctccggtaacgcgataggtggtgccgtccgctccctgggcgacaacgccggtgattgcgccgttttccgaaatcagctcttgggcgggcgtgttgaggtagatctcgacggggtagtcgttctcttcgatcatggaggtgtagaactcgaaatagccctggccgcaagtgccgttgaccgatgatgtccagcggggccacgagtaaccgacgatgccgacgagcggcttgaactggaacccgctttctgcgagccaatcgtcgagctcggcgatgtgctggccggaaatcaacatgtcggcgtaggctccttcgccttggatggcgtactggagagcatgaagttcgaccgagtcgaataccttggtcgagccggatgccttccatgcttcgatgtcggctttgagtttttcaagatcggctgcgggcatgatttcggctgcagcggcaacgttcgattcgagctcggcggtgtagttggcggtcatttcctcgcggagatcttcgggggcgtgcacgtattcgaggtatccgccgctgacgagcgcgttgccgccgacattgcagcttttttcgagaacgatgaccttcttcgcgcctagccgtgccgcgtttacggcagcaactgttccgctggcacccgcgccgacgatgacgatgtcggcctcgagctcgactacctcggtggagggtgcgggggcctcgtagttcgatttcagcttgcttgcgctgccgcccgcctgcttgacgcagtcttcgcatgccgcgatgatcgcggtgctcgtcagtgtggctccgacgatagcgtcgatgccaagcgactgatgttcgacgatggcggccgggatggtttcgagcgcggtgtccgatatgtacttggtttcttcgtggtcgacgacggtgacgctttcgatgctcgtttcggtgaaagtcgtctctacggtgatgggcgcgaacttgccttggccgacgcccgtgtacgtacccgccttgaacgtcccgttttcgccgcctgcggatgcactcggcgcgcagcccgacagcccgaacagagcgatgttcacgcctgcgatagccgcgcctgcaacgaatccgcgtcgcgtgatgccgtgcggcctcgatgctttcgtgttggtggttttctcgttcatcctcatttcgatcctttccctcgtggtctcggatgctgccgagtatgccgcgctggcagcatttgcgaatctccctcaggctcaaattacggggtaactttgtaacccgatttgtaacccgagtgcgctttcgctggtcaaagctctattcgctgagttgagacaaaggtgtctcgccgagcggttcagttgctataatgagccgatgatcgaagggggcacatataacttgggtgctgggcgctcgggcgcaggcgaatccgcttcggccgatggccctcggctcggcttcggcgcatggtcgttttgctttttcggattcgcgtttgcccgcgcgtggctggagatcgtcacctatcgctcgacgtttctgttcccctacgatgcctgggttggcgaggacctgttcactgcggccatggtgattgcgttcattccctttgcgctgttcgctcggaagttcgcgccgttgtacagcaagcgccatgcggcgacgacctgcacggtttcgatgatcgtctcgggtcttgctttcatggcggcgagcatcttcccgcaagccgctgtgcctctgggcctgctcgccgtcgtcgggggaggcgtcggctcggcgctctcgatccttttatgggccgagcttcatagctgcttcgagccgctgcgggtcgttctctacatcgcgggcgcgtttctgctgggcagtttcatcgcatgggtgctgctcgaccttgatctcgtgaggctggcgatcgtgcttgcgctgcttcctgtgctgtcgcaggtgacgctgcgggcctcgttcagtctcgttccgaaagccgatctgccgaaaaagacgtggggcaagctccattttccctggcgcctgctcgtagttttgggcatctaccagttcgtgtacggcgcgaagagcgaatcgagcatgccttctggcgagctgttcttgctggggaccatagccgtatcgctcatcgttctcgtcatcgcgcggctcgtgtcgaaacggttcgacttcacgcttttgtatcgcacgccgttcgtgcttatgatgtgcgggcttgtgatgacgtttctctctttttcgggaacgaattctgtggcggggtttttcatcgccgccggttattcgcttatgtttttggtgctgaccatccttttgtgcgacctgtctcatacctacggggtttcggtgcttgtgctctgcggcatacaaaacgttacgttgatcgccatccctgcaggccatatggtttcgcgtatgttcatgggggagcgtgcgatggttgccgtcgattcgacggcggtcacggcggtgcttacgattctcgtggtgatcgcaacggttgcgctcttttcggagaagggcggtttcggttcgtggggtgcggcattcttcggtgcgggcgatattgccgaagaggatgcgcgggcgaagctgcttgcgcgctgccgcgagattgccgagacgttcgggctgagcccgcgcgaggccgaagtgctcgagatgatcgcagtcgggaagaactcggcggtgatcgagcgggagctctgcatagcgaatggaacgctcaaatcgcatacgcgccgcatctaccagaagctcggcgtgcacagccgcgaagagctgcgtaatttgctttcggcgtaaaacggctcgcacagacggcgagggctttgtcgtctgcgcgagcagattttgaaggcgtgggacgggcgccgttagtagattccgaaaattcctcccatcgcatacgaccaagccactgcgatagcaacgaatgcaatggaggtgatccagcctgctttggcggtatccgaaaacttataccatccggtatcgaacgtcatgttcagcgccgggcaaagcggtaccaggtaacttcctgcgatcagacatacgatcaggaaggtaggaaggaacggcggtattcctaccacggttgcgtaggttatcatgggaggtaggaagatcgccacccatgaaggcgatgtcgggcagaaggtgtgcagcagatagaggaacgccccgatgatgagcagtgcggcgaacacgggcatggcagtgatccccgattgcagaaacagcgttgcgatgaagtcggcagcgcctgtcgatgcgatggctgccccgatgctcaatacgccgccgaagaacatgaacagattccatgaggttgcccgttcaaactctgaccaggtgacgatgttgattcccgggaagaacaaaagcagcatgccagcgagggcgacggtagtcgcgttgaacagcggtatccagttgccaagaatccacagggtcggcaagatgacgagcaaagcgaggcacttcttgtcgagtgcgtccatcggtcccgtttcgaatttggaacccagtaccttctggaccgcttcctctgtgatgggttcgggaggaaatgcttttatcagggcgagccaagcgatgggaagaatcgcagcgcagataggtacgccgtagctcatccaagacaagaaattgatttgcagccccgttgcttgggtgtatatacctgccgccagcacattcaggctgtgtccgatgggcgtggtgaatccgccgaaaagcgccccgaatgaaacgcccagcaaaaggcatcgccccagattcgacgaccccttctttgcgcctagggtgtcgagcagcgggagcgcgaagctcatcatcagggcaactgcgccggtgtcggtcatgaatgacgagatggctgcagcggctaccataagcatcaagacgagcttcttcgaattcccttttgccaaggcgatgaatcgtttggtcaacctcaggcccaaggtgcttttctgcataagaagcgtcatgcagaaaacgccgaggacgaaccatgtcgtcgtggtgataaaacccgagaacgcatcgccgaacgagggaacgacccctaaaaccaacagtagaaaacaggcgagaacccccgtcatgcctgtagacatgctgccgcaaaaccacatgaatatcgcgccggctaggattgccagagccaagatgccttcgtggctgagcatgtcgctgccaggaatcatcgctcccgcaacgacgcaaacgaacatagcgacgaaaccgaacacctgctttgcatgcattgtgaccccactcatgcactacccccttaacctactcggttatttcgtcccagggggcttcctctgtacgggaagtcccctgggacgcttcagaaagagatgcgtctgccggttgctccttatgctccgggagctttgggcgccctgggcgccccaggtgctttgggcaccccaggggcaccgggagcgttaggcgcgcctggtgcccctggcattgcgggttcggtaggcagcgcggttccgcattgcgagcaaactacgtcggttgcgttcgcagcggctccgcatagcggacaagttttgtctgcgcttaaggacgcgggtctgaaacacatgggaaaatcctttcgttcaaaagaagtcggatgcatcgattgggaaacccaagactctattccttcgtcttgagggcgtacagaacctgtttcggttttgctgcaaggtcttttgccagctcttcgacattgccgatcttcaagacgtttgcttgacagtggtgtacgcacatgggcacgccgtcgtgtgcagccgtgcccttttcgcacaggtcgcatacgtcggtgaataccggaaggtaggtgtcttgccatacatcctcggttatttcccaggctccctcgtggtggactacgacgcctgctcggttattgggcaggtcatgggatacggcgcatgcgatttcgcaggtgtggcatcccgtgcagaactcgtaatcgatcaaaattccctgtaccattgcttactcctcaaccttgtcgatcgtgaccagcatgtttttgtaatcgcagccgaatccagctttgccctgatcgaactggaacagggtgttgcagttgtactcgagcgctccgaacagaccgtcttcttcggagcgcccttcgctttcggggaaccaccagccatgatcggtgctggcgattccgggagccatggtctgatcgatgaccaccttgcgcttgcacgatccgaactggttgcgcagaacgacccattcgccgtctgcgaggtcgaatttctcggcgatatcggtggggacgagtaccgtaggatcgggatgcaacgcgcgcatgcgtggaatctgccgatgttcgctgtggaagaggctccagttgcgcgatccggtggtcaatacgacaggaaactgctcgtattcttcgggcgtgcggtaggggctatgggtgggctcttcgtaaaccggcagcggatcgagtccgtagccgttgtacagcgtgcaccacagctcgattcgtccagtacgggtgttgaaccctacctgcccatcggggcgtagctttcccgtcttgtacttatggtactcgaaaggcaggtagacgggcgcttgttcgcggacttcttcgaatctcatgccggtttccgcgaagatactcgagaacatatcttcttcattgtcccacggatacgcttcgggattgaaccgcttgcccagctcgcggttcacctgcatatcgctgcgtacatcgatgccctcgttgcggcggtcgactgcgcgattgatcgtctcggcgcgctgtacgccgtcgccgattcgtatgccctgtcgctcggggaacgatgcagcgggaagcactacgtcggccaattccatgatggtcggcgtcatgaacaggtcgatggcggctacgaactctagcttatggaacgcttcgatgaggtactcggggtcaggtgcggtattcaccaggaaatttgtggtttggatccaggcgcccttcatggggtggtcttcgcccttctcgttcttgcccgtcatgatggctctgtacacttcgtcggcatctgctttagaataggcatctgccaccatggggaatttggaatcgccgatgcggttctttctcttttcggggtcgagcagctcgcgaccccagccgctgaagtacatgagtatgtagtcggggcaaatcataccgccgggattgtcgacgttgccggtgatcgcctgaatgcaggttatggcatgccccgcagccacggcgttcttctgcatgtcgacggcaacgccccactggaacacgcatccatctgctgcggcgatgatgcgcgcggcttgccttatcttatcggcgggcacccaggttacctcttcggccttttcgggcgtccactcctgaacatgggcggagagctcttcgaagccgtacgtccaggcatcgacgaactcatggtcgtacaggtcttcgttgatgatgacgttgagcatagccatagccatggctgcatcggtgccgggcctgatcggcagatgcacctccgctttgtttgcgagccaaatgcgctgggggtctatggtgatgatcttcgacccgcgtttcatgcagtcgacgacccaatgaccgtacaagccgtcggagttcgatttgagcgggttgttgccccatactacgattacctcgggcaccttccagttgggatcgtcgtagcggtcgacgaactgctgggaatagtcacctacccagaatgatcccgttacgcacatggcaccggcgacgcgcggaccgtagcaggagttgccagacatgccgaacacgttgttcgggctgccgaatgaccatgcgaaacgggtgatccacggtgcgatgtcgcgtcctgttccctggaaaaaggcaacgctttcggcaccgtatttctcacggaatccattgaacttctcgtagatgagatcgtacgcctcatcccaggtaatgggagtccaaacgtctttccccctatctttcggatctcttttcatgggtgtggtcaggcgatctttgtggtagacagcttccatggcatcgaggcagcgtacgcacaggcgccccttgttgaacgggttttcgggatcgccttcgatcttgacgagcttcccgttttcgtcggtgtaaagcaggatgccgcacccgagatggcatccagggcccgaccacgcgcttccgcgggtgacggtcaggccgtcttcggtaacgtatctccatggtttttcatgctctatggtttgaaactttttctccatcgttttccctctcgcttcttcttcgtcttgcaggttgatctagtcgggcaaatgtggtggcgattgcgtttggtttgccgtatcggttgccagtatgtatcctggcggcttggggagaggcatgccgcaggcttcgcaggcaaaggcgtcaggggggttgagatgctgacactgagggcatacgccttctggaatgggttcgcgcacctcccctgtgcattttccgcaattgcagcagcagtagcacatgggcttacctccatttgctcggactcttgtcgcttgccggagccgctttagcgatatccggcaagcgtattggcgattgagcttgctagaaaactatccccactgaagccaggcctgcgcagatggcgcacagtacaatggcgggaatggcgcatgctacgaattgctgcggccagatgtgcttcatcttgcagccggtcacatccaggtttacgaacaggccgcctgaatagggaaccgtggaacagcctgcggcgccgatcgatacgattcgggttagggcatcggcgttcacgccggggatggcgagccactgggcgccgaacgtgttgcagacagccgttgaggttgcacctgccgagccgcagatgataccaagcagctgagttgcgatgaatccttggaagtacgggtttccggcagagcccattgcgatatccacgagagcctggaatgcaggtgttgcggagagcactgaggcgaacgcgaccatgcagaacatcgcggatgccgggctgagcccgctcatgatgccgtcgaacacgctcttcttcataccttcgccgaccgaaagtccgctctccttgttctcgtagtacttgaagttcaaagcgaggcagatgatcgtggcgatgacgtttgccgtgacgacggcagttgtggcgctcatcttcggaatcggaccgaagccattgcccaggatgacgaagagggcgagcagaacgacgattgggacgaccgagcgcaccatgctcggacaggtttcgatcgctcgcggtttgatgggaaggccgacgccttcttcgaaggcatggccgcgcttcgttgcccagcgatcaagccaatagataaaccagacatcgaatgcgaaccacagaacggtggcgatgatgccccagcccggagctgccgttacggacgtccctaggatctgcgctgcggcgacgttgccggtttgcggggatcctggcatagccatgttcgctccgcccagaaggcccatgtacatgatggtcaggaagatgtagcggggtttgttcatcgcacgggcgatgggcatggcgagtggccagaatacgaagacgatgaccagggcgttgattcctccatacgtgagaatcatgcagattagaatgagaaccggataaatgaatttctcgccagccttgtccagaacccattgtgcgatgcggtcggctgcaccgctgtcgcctatcaccttcgcatacatggccgaagtgaggaacatgagaatgaaggtggtaacccagttgcctgctgccggtagaaagtaatcggtgagggttccccaaacgccgaatccgttgaagacgccgatgatcaatgtggcgatcagcgcgcatacgatggcgttccagcgtcgccatgctaaaacgacgagggcggcgattgccagaagaatacctaaaacgcctaacacaagcatcacccctaactgaactaaatgaacgtgtttagatgccgtcgaagcgattctgcgagctctacagaatccttcgggaaaaatatagagcgcgtggtggcggaatggtattgtatgctctgcatggcttatgcagtttttgcacgaggcgataggggagcaatgcaaatcgagtatctgaaggaattccttctccttgcgagcaacatgagtttcacgaagacatccgccgaaacctatcaaacccaatcgacgctcagccgacatattgcagccatcgaggaggaaatcggagccaagcttttcatccgagatacccatcatgttcgcctgaccgaaataggcaaagcgttttacgaagattcccaaattaccgtcgaagatttcgaccgttcgattcgacatgttgagagcctgaagaagcagggggagattttacgcatcgggtatctctatgatgctgctcgggatcggctgccccttatcagcgaagcgattctgagatcgaacagcaatatagtcccggaataccaggcgctcgaatacggtgatctgatgcaaaagcttcgccagcgccaaatcgatctgtgcgtaactttggatatcgattccgatctaggcgattcgttctgccgggtctatataggcagcgatacgtattacgccacgatgccgaaaggccatgtacttgcgagcagggagttcgtcactctcgaggacttgtcgaggcagccgatgatattccccgacccaaaggcaatgggcgctatcaacgcgtattatcgccgtgcgctcaaagccgatgtgtacggcatcaacgcgtcggcatattacaaggatattccctcgctggcgtaccaagttgaatgcggtatgggcttggctctcgttttcggtcatcatcgggagcgttacggcgatcgcatagcgtttgttcccatcgctgatttggcgcagtcatgccaggtctgcattatgtgggacaaaagaatcgaaagcgttatccaggggtcttggactcaagaactgaaggctttggggcaataagggatcgacgttatcttcagtcagcctcggcgtgcacggccgcgaagcctcgtcgaaggagctgagcggcagatgcgcactgttctgcacagtttttgccagattcatacattctcggcgccgaaaatcccccgaatcttgcctgcgaagacgggaacgaacgttttcgcaggtcacgatggtgcagatatcggcacaaaagcggggatacggagatcgtgtatgaatctggcaaaaactgtgcatattggagcgattccgcggctgcggcccgaatcgcgatttcgccgctaaatggcctgggtgtcgacatcgtctcgcgtgcaatggacgtcgggatccaccctgaagcatccgatcttgctgttggcggtgaagaagcatcggataagctcgagcgcttcctccttctcagctgaacagctctgcccgcttgcctctatgatgcctatcttggttatcatcgtatctttgatgtcgcgcaggcagatgccttcgggaaggcgcttgagccgtgcgatgctggggatgaacgtgaccgcatcgttcgaggcgaccctgcgaaagacaaccgaggaatcgtttccgacatacgagaacgacctcctgtcgatgtgcagttcgaggaagtcgagcagtgcccgatcggcgtagcaggcgacgggcatgctcttcagttcctgcagtgaaagggacggcctcgaagccaaaagcgagctgttggaaagcgcgaccatgagatcggtttcggcgagcggctggaaccggaggctgcctttctcgatcatgcttgcgagcagcgtgcagtagtagtcggtcttcgggaacgagatgatgcagaaatggtggctcggcatgtcgcgcagcatcatcttctcggccccgatcagcgatacttcgcgaaacgcgtatttctcggcggcgcctgcgccgaatatcgaatcgaaatgaggcgagaggtacttcgagatgaagggcgtgatgtatatcgtcagccgctcttgctcggggatcctcatcgcgtggtttttggcatgccccgcgatttcgttggtgatgtcgatgagcttgtagaaatgggggatcatctccttcgcggcgtcggtgagggcgagccgtttgccgctgcggatgagcagcgccacgcccagctcttcctcgagggatcggatcgccttgctcagcccctgcggagtgaggtagagccgttcggcgctttcggtgatggataagctctcggagacatcgataaagtattcaacgtaacgttcgttcataacgtcagcctccccctgaatcggtccttcgtcgcgcattcgctcaaaagacttccgcccacagtaacatataatttgttaccatgatctgatcatcgggtaatatccgtcttattggtgtggggccaatcagtacccgaaagcgttcttccgtcatgtccgcacggcgtatctttttctgccctcatctttatgacgtggtaaaacgcagctgattactcattgtaaacacgattttgggttcggttcccatccgtctgtttcggttgcgaaacagacggatgatggcgcaacgagcacctcccctgaaataatggcgcgacgaggggcatggacgtttctgcttgaacggcagtatcgaacgatcctgacgggggtgataaatcaacagtgaaaagaacgtttctgtgagttgatttacgtaaggggagcggtttcgatcgaggaaggaagattgatgaccgaatcggaaaagcagattaagtacggaaaccgatggggctatctggtaaagggcttcatcatgacgatgtttctgggcatcctgtatgcctggtcgatttttattgcaccgctcgaggaggctttcggttgggtccgaacggagacgaccatcacctactcgatcatgatggttaccttcgcgctcgggcagcttaccgcaggattctggtcccgcatgctcaagagccaatcgcgggcgttgacgctgttcagcttcctgctcgcgctgggattcttcttgacctcgtttaccgaatcgctgccgtggttgtacttctggtacggcggattctgcggctacacgctgggcgtcgcgaacaactgcatcatctcggcggcccccaagtggttcccggataaggccggccttgccatgggcattatcgttttgggcttcggcctcgcatcgctggtcttggggcagctcgcaacgtttctcatcggaagctacggctacgttatcgccatgcgcgtgctggccgtggtctgcttcgtgatggtgacctgcgtatcgctcctgttcaaggtgccgcctttggggtacacgcctcctggctatgtggcatcgaagaacgagtcggacgacatcgcgacgggctactcgcccaggcaggttctgcgcactcggcagttctggatgatctacctatgggacttctgcaatcatttcgcagggttcatgatcatctcgctcatcgtcccgcatggcgtgcagatgggaatgcccgtggccatggccgcgctcgttatgggcatattcggagtctgcaacgcgttcggcaggccgctattcggcgccttcggtgacagggtcggcaggaagacggccttcatcgtggtgaacgcgctgatggttgtaggtcttttggccattgcgttcttgccgagcatgatggagccgctgacgggttttgtggtcggcgctgtgatcatgggcctgtcgttcggcggctcgatcagcctcaaatgctcttcgatgcgcacctacttcggcaacaagtacgttaccgccaacatcggcctcatcgcgtctgacgatgcgccgaccggcattctcggccccatggtggctgctgccatcttcgttgcgacgggcgcttacttctacgcgttcctcgttgcggcagttgtgtccgccatcggaatcctgttcccgttcttcgtcggaaagcccgtctcggtagccgagcgcttcccgaacgaggttgacggaaagcccgtcccgaagcccgagcggctggcgggcgaggcgtaaggatcgcatgtccaaatgctcaaaccggcccctcgaaacctggtttgatgtacgacgaatacttatgaagagaaggagaaagctatgtgttttaggccaccagatgtaacacaagggccgcttgtctgccccgagtgcggcaagaagatcgtgtcgccgaacttcacgcccgtcacctgcccgttctgcagcgccgcgttaccgggggctccagaggcgccggcatcggccgcgccgaaagctccgggctcggctccaagcgctccgggtgctccgggcgcgcccaagcctcccgtggcataagtcgggttttccaagcgtagggagcagcaactcgttcgaacaaggtcggggaaagatgtgacgggggtggcttacgtatcatggtgctattgaaaagaatcaccgaggggaaagacgccaagcagctcatcgggcttgtggtaggtcttttgataatgggagtctcgtactttttgcctgcaagtccggatttgtctcacgaagctacgatgtcgttgggcgttttgctggggaccgtggtgatgtggctgtgcggaaccatggcgaccggcgccgccggcatgctgggcgtgcttgccttggtggtgctcggcgtcatgccgtctttgcccgaggcaatgtcgggcttcatcgcgccgaccacgtggtttgtgctcggggtgttctgcatgacggcgctgatgcagaaaagcaccctgggcatcaggctcacgaagcgattcatcatgtgggctggcgccgattcgaggaagctcgtcttggcgatcatgggagtgacgacgctttgctcggcgatcatgaccgataccggcgcagttgccctgagcatgagcttcgcccttccccttctggggcttatcggggcgaaggcgggttcgtccaacctgggaagatgtttgatgatcggcatttcgttcggcgcttgtttcggaggcttcaccacgccgatcgggcattctctcaacgtgttggctctcggcctcatggagcagcaggcgggaataaccgtcgggtttctcgagtggatgacctacggcgtgccgatcgcgctcatcatcctgcccttggcgtggctgttcataaccaaggcgtttccccccgaggccatcagcgaagacgacatcaagacattgatggacaaccagttcaacgtggggaagatgacggcgcacgatgtgaagagcctcgtgctgctcatcgcgatccccgtcctgtggattttgggcaactggattccgttcctcaacgcgacgaccgttgcgctgttcggaatgctcatgctgttcgttccgggtatgaacatccttacctggaaagaattcgagagcatgacgagctggaacctgatcttgttcttcggaacggttctgagcctcgggggcgcggtgacggcgacgggtgcagccgattggatcgcggctttgttcttgaattcgggcattctggatctgccgctgtttgtttcgctgttgatgatcgggatcgttctgtacctggtcaacagcgtagttccgattgcccttacctggacgacgatctttacgctgcctttggtgtactttgcgcaggcagtggggattgcgcccgtggcaccggttttcttgatggtgtgcttgactgcgggaagcttcatcatcccgctctgcccatcgatgaatatgaccctcgataccggctactacacgttcggggaggcgctgaaatcgggatgggagacatcgattgcgatcgtgctggttgccgcgatctgggtgttcttcatcgccggcgtgctcggcctgtagcggggcggttgagctttccgtgatggcggctgctgcgaggctggcgtctgcaccgaaagcgattgcaggacgatctgcaaaacgaagatgaaaaatggaggagaatcatggaaaagaaagtcagaacagtttgtttcgattgccattcgaaatgcggcgtcatccttacggtcgacgacaacaacgacatcgttcgcgtcgaaggcgatccggattgcccggtcaacgacggcatcctgtgcgtgaaggcgttctccgctcaggagatccacgcgcatcccgatcgcctgaagtaccccatgcgccgcaagagctggagcgtcgacaacccgcacaccgagcttcgcggcaaagacgaatgggagcgcatcacctgggatgaggccattaacgatatcgaagcgaaaattcgccagaccatcgaccagtacggtcctcagtcggtcatcatctcccaaggaacgggccgtggctcgaaccacttcctggatcgcttgaacaacacgtggaacggcggcggcaaggtgtggccgacgcacgtctgcctgcttcccaaccttgcgcagacgcacgtgacctacgggcgcatgttccacccgcacgaggcgtgcgactatcgcaacgccggctcgatcgtcatgtggggcacgaaccccatccgttcgcgtcagtacagcggcctgcgcatcatggatgcgaagcgcaacggcgcgcatgtcgtcgtggtcgatccggtgttccgcgacatcgccgcgaaggccgacctctgggtgcccatccgacccggcaccgacggcgctttggcgctcggcctcaccaacctcatgttccaaagcggcaagttcgaagctgctgatgaaatgctctccacctggacgaacgcccccttcctgatcgacagcgaggctcgcatgatgctgcgcgaggccgacatcgtcgaaggaggctccgacgagcactacgtggtgtgggacaaggtgagcggtggcatcgcgatatggcgccccgagaccgaggatttcgaccgcaagggcgtgaagccgtcgcttatgggcgcatacgaagtgacgctgaaagacggcagcaaaaagctgtgcaagaccggtctggaaacctataaggacgaagtcgccgtgtggactcccgaaaaggtatcggcggtaacgtgggcgccggtcgagaagatcttgaagatgttcgagatcatcaccaacccgaccgacgacaagccctcgcttctgaccgcgtacctgggcgcctgcatgatgacgtcgaacgcgttgcagtcgggccgtgccatcacgatcctgcagctgctgctcaatcctccgctcgacgacaagggcggcattctcttcaacacgttctgggagttcatgctcgaccccaagatcacggcatacgaccgcgttcccccgaaactgcgtttgggctacgacaagcacccgatgtacacgcaggtgtacggcaacgccaacattcccaacgacgtgtgggatgcgatgctgaccggcgagccgtggcctgttaaggtgatggtttcggtcgcgaatgatccgctcggctgcttcgagaacgccacgaagatccatgacgcgctgtgcaacgacatcctcgagctcaatgtgaacatggattacttcatgacgcccggtgccgagatcgccgacatcgtgctccccgcgcgccactggtccgagcgcgtgggcaacttcgacgaagagctctatcccgagccctgcccgttcatcattccccagattgccgttcaggcgccaggcgaggcgtgggacgactgggacttcatgcgagcgttgggcaagcgcttcgatcccgagctttggccgtgggacagttccgaggagatgcagctgtggaggctcaacgagttccatctcatccccaacggcctcgagcccattcacgattacgagaaggctgcggaaatcggctacttcgtcgaatacggcggcgagaagcgcacgacgaagcagcatgagaagggcctcgtcaagttcatgacgcccaccatgcgaatcgaagtgtactcagagcagatgccctcgtacggatacgattcgccgctgccgagctacagcgagccgttcgagagcccgtattcgactcccgagctctacaaggagtacgacatgtgcctgacgacgggcgctcgcgactacgccttctaccattcggcgtggacgaacatcgcccatcagcgcatcctggagccgtggccctatatcgagctcaacgacgaggacgcgaaggagcgccagatctccgaaggcgagtggctctgggtcgagagcctgcgcggcaggatcaaggcgaaggcccgtatttccaagggcgtgatcaagggcgccgtgagcatgtgccgcccgaactacaagcatgcgtgcgaggagctcaaccttcccggcttcagctgggatcaggctaacccgaacgtgctgacgaccgcagacggttccgatccgggcttcggtgcggctccgatgcgaagcagcttgtgcaaggtgagcaagttcaccgaataggttgaaaatacgcttctcgttgatgatggaggaagaatcatggctaaaaaagttggtgtgctcgtcgagctcgattattgcgtgggctgctctgcctgtcagctctcgtgccaaggctattacgatctgcccgtgaccgaaacctacatgcgcgtctttctcggcaagcccgacgtggtcgacgggcaccacgagatgttcatgtcgccgtacgcctatcgtctcgataaatgcgcgtactgcttggagaaggaggagggcaacgcgccgtgtgcggccatttgcatatcgcgtgcgctgcacgttggcgagcttgaggagatgaagcagctcgccgccaagacggaaggccgcttggctttgtacagctagccgatagcttgcattcggggtgccgtgtgccgactggcgcgcggcactccggttttgaaggccgggcggagacatcgtgcaacgtccgggacggttggaggcccatgatgacgtttgcttgtacggattgttcgcgatgcgggaaatgctacgaaaagaaatcgacttgcgcagcatgcgggggtgagatcaaccttctcgatgcctgctgcccgtcgtgcggcgagcccattaccgatgagatgagggctcgtgccaagcgggcctacatggacaagaagaagatagagcatgacgagatcgtggcgctcgccgctgcggccaaggcgcgacgtgaacgcgagcaggcgaaaaccaccgtcgtctacccctgggaagagtcatgatggcatcggatcccgaacgcggggcattgcgcctcggcatcgatttgggatcgaaaaccgtgaagctcgccgtgctcgatgaagccgggcaccttctgcattcttcgtatgaaagacacctctcgaacgtccaggaaacgttgcgctacacgataagcaacgcgatccctcattttcccgatgcggagatgaccgttgccgtttcaggatcggcgggtatgcagcttgccgagatcctcggcctgccgttcgtgcaggaggtgatcgccgcccgcgccgccgtgcgcaggcgcattcccgaggccgacgttgccattgagatcggcggggaggattcgaagatactgtttttgtccggcagcgaagagctgaggatgaacaacacatgcgccggcggtacgggaggattcatcgatacgatcgcgggtatgctggatgcgaacgcggaggcgctcaacgtgcttgcgcacggatgcaagaagatctaccccatagcctcgcgatgcgcggtctttgcgcagatggatgttcgaccgctcttgaacgcgggggcatcgaaggaagacatcgcgggttcggtgttcgatgcggtcgccacccagtgcatcgtcgggcttgcgtgcggccggccgatagtcggaagggtcgcgctgctcggcgggccgctgcatttcttgtcagcgctcagggatcgtttcaaggccaaactggggcttggcgacgatgacgttgtcgttccgagcgacggccacctgttcgttgcggagggtgccgcgctttgcggaggcggcgagacgacggtcaccttgggcggtttgagggacaggctggacgatgtgtcgcttcggcaagggtattccctggaacggctcgacccgctgttcgcatcggaagaggagcgcgccgagttcgtgcagcggcacagccgatgcacggctccgcgcagcgatcttcgcagcgcgagcggcagggtgtttctggggatcgattcgggctccgaggcgatcaagtacgttctgatcgacgagcagggccgcatcctgcgatcgtattacaagcgctctgcgggcgatgtggtcgaggcggcccgcgagatgctcatcgatctgtggcgcagcattccgcgcaagcacgacgggacgcctaccgtgcgcatcgcgcatgcgacggtgacagggtacggcgaagcgttgctcaagagggctttcgcgctggattccggagaagtcgagacggtcgcgcatgtgcgcgcggcgcaagagcttgcgtttgacgtcgacttcatcctggacatcggcgggcaagacatcaaatgcgtctggcttcgagacggcgccatatccgatctggttttgaacgaggcttgctcgagcgggtgcggcgcccttatcagcgggatggcctggtcgacgaacgtgcgcatggagcgtttcctggaagaggccatgcgtgccgagcatccggtcgatctcggaacacgctgcacggtgttcatgacttcgcgcgtgcggcatgcgcagaaggagggcgcaagcgtgggggagatcgccgccgggctcgcctattccgtggtaaaaaacgcggtctacaaggtgattcgggtgcaggatgcctcgatgctcgggcggcgtatcgtcgttcagggaggaaccttcgcaaacgatgccgtgctgcgcgcattcgagaaggtctacggcgccgatgtttgccgccccgatatcgcggcgtacatgggcgcatacggcgctgcgctgatcgcccgcgagcgtgcaggcgaagacggcgcatccacgctgctcgaccaatcgagagtcaggcggctggagtgcgttaaagcgaggaagcggtgcgagatctgcggcaacgcctgcccgttgaccgtagtcgagtttgctgatggagacgcggtgcggaggttcatcgtcggcaatcgctgcgagcggcctttgggagagccgtcggcgaagagcctctatcccgaactgttttcgtcgcaggtacagcggctcttctcgtacggatccctctcgaagtcgaaggcgcgtcgtggcgagatcgggctcgtgcgtgcgcttggcatgtacgatctgtacccgttctggtttacgtttttcaccagcttgggatttcgggtcgagccttccgaccttgcggcatcgtcgcgcacgggccggtggctcgaatcgattccgtcggagtcgctctgccatccggcgaagctcatgcatgcgcatacggccgatctggtcgaccgtggcgtgcgaaccgttttcctgccctacgtcgatgcggttcatgaggggaagcggaactgtccgatcgtagccggctatccgctggttttgagcacgaacatggattgcatcgccgaggagggcgttcgtctgatcagcccgcatctgcctgcactgctcgatggaggcggggttgacggacggcttgcgccgttgttggcggatgcgttcggcatcccggtgggcgaagtggagcaggcgctcggggcggcgaagagggagctgctgcgctatcgtgttgacattgcggcgttgggcgacgagaccttgcgctacatgggcaagagcggtaagccggcggttttgcttgccggccggccctaccattgcgaccctattgtgaatcacgggattcccgagctgatccgatcgttcgggttcgctgtcctgacggttgactccgtggcgcacctcgacgggcgggcggcgcgcggtgacggggcgttgggtggcagctgggagtatccggaagcgatcgttgcggcggcgaggttcgctgcggcgcgcgaggatatcgagttcgtgctgctttactcgtttggttgcggactggatgccgcgatggtagacgaaatcggtgcgatcatgcgagagcgcgggcgcaccctgacggcgttgaaggtggacgagatggtcgaccttgctgcggtgcgcatccgcattcgctcgatgatcgccgcgcgcaacgggctgttctcgggaggcgcacggcaatgatcgtcattcccttcttgtcgagccaccatgctccgctcattcgctctgctctcgcaggcatcggattggattgccttgtcgtagacgattcgggcggtcaagtgatcgcccgcgggatggagtcggtcaacaacgatgcgtgctacgcgtcgatactgagcgtggggcagcttctatcggttgcggatggcttacgcgatggggaacgcgcaggctgcggtgcagacacgcagtgcgggggaggtgggatggcggcggatgccgtctcctccgatcgcatcgatgtgatagtgtcgcaactgtgcccgcattgccgcgcaggcgatctgtctgagcagatcaaacgtgccttcgaaagcgcgtctcctgcactcgggtgtgtgcggagcattgcagaagcggcctcgatgctgcctgcgggctctcttcgacggctctccgaggctctcgtcctcggggacgctttgttgcaggccgagctcgccgtgcgccctcatttgcccgatggcaagcgcgcggcgttcgagcggttgatcgcccgatggcgcgatacgatgcgcttctggctggctcaaggatccttaaccccgttttcttcgctgctcgaagcgttcgaccgcgccgtgcacccgtttttttcgtgcgagcgcttcgggcgtcccctgattggcgtgatcggggcgccgggtgccgtgttcaacgtcggcataaacaacgatctggtgcgatgccttgagcgagagggctgcgaggcggcggttccgtaccttgctccgatcgccgcccgcgcgctcgccctgcaaaagggaggcgagcgttttgccgagcatgttgaggcatgctgcgagaccgcggcgaagacgatggcctgcgtacggtttccctgcccgagcgtttccgaattgagacggcgaggcaccgaggtggtgcctgagtgggtggactgcggcatggggtgggcacttgcgggtcaagcgctgctgtttgccgagggaggcgttgacggcatcgcctatgcgcggacgttcgggtgtctgtcgggccacgtgtgcggccaggggatcatgaagcgcctgcgcgagatcgggaacggaagaggctcgctggtcgcttacgcgacgatcgaatacgatccgggaacgagcgccctcaaccaggcgaaccgcatcaagctgcttgctgccatcgcccgaggcggctcatagggcgaaggcgatcgtggccgggcggttcgtgttcgtaccaacgaaaaagcccccgactcgttcgggggctttcggcggttcgcatggacgggattctcgcttacgcgtagatttccttttccaccacgaggtcgttcttgatcttgccgacgagtttttgcagcgcatcgatggcgttggggcgaatatctgcgccgatcagcacgtacatgatcgaatcgcccacgttgaggacgccttcgttgagccagacgcgcacgtagtacacgcccggccacgtgagcgcttcggcaacggcggcgtcaacgcctgcggcatcgtaggagaactcgacctgcgccacatcgccgagtccttcgacgccctcgcgaacctgcgctttcggggttacgcgaacggtgccgttgtgggtgaggaacataccgcactggtcggccttcggatcggctttcgcttctttgagccactgatcgattgacggttctgcttttgccatgatgcccctcgtttcgttttcccatccgattgctcggaaatcctagtatatcaatggggttaagtataccgcatcaaagcggttatcctccgagaaggagagatttttggctggctagtggctcctttgccggctttcgggttgtttggccgatttgcggggtcttgccatccgctcttgccggattcggattcggcaagagcggatggcacgcgagcgccgtcgcaccccgcttcgtccggcctctcggggcgggcgaagcggggtgccgagaggccattggcgcggcctcgagaagcgtccgacgtcgatggcgggattcgggctggcgggccgagcatgccgatggcgggattcgggctggcgggccgagcatgccgatggcgggattcgggttggcgagcggatcgcctcgatctgctagttttttgccagattcatacatatatgccgcaaaaagtcttccaggagactcgctttcagaagcgggtcctttgttttcccagatgggaggccgtaccgtcggcggggtcggcatcggcgcgtgcgaacatgtatgaatctggcaaaaactgtgcagttcggccggaagctgtgattcaggcaagaacacgttggcgctggcttaaccgcggatgacgggagggcggtgggcggcgctttcggacgcgggtccgggtgcggcgagctcgggcgcaagttcagatgtggagtccgagcgcggggctcggactcgaagtccaggtgtaagtttgggcctgccgattcgcccaagggagggaggatggcgaatcgccaggccattgcggaaagtgcgttttccgggatcggcgcgaacagccttatgctccagccaccagctttaccacatgcagagcttcggtcatcgtgcggccgcaggcgaagccgtggagctggtcggggtagcaaccgctgaacacgctgcccgagcaatcgcccgctgcatagaggccttcgatcggatggccggacgtgtcgagcgcctggcaatctttgttgatgcggatgccgtcgatggtggtgagcaaggtgccgccgagcgttgcgccgtaaaacgggggcgtgcgcagctcggagaggcgataggcttctttgccgaagtcgggatcttcctgtgcgtcgaagagctcgttgtagcgctcgacggttgcgaggaagttctccttcgcttcgccttcgaacccgagcaggccggcgagctcttcgatggtgtcggccttctggaggcgtccgtcttcgagctgcttctcgaagtatccgtcaaggtcgtagctgccgtcatcctgtttgtaggcgagcacgccgttgcgcgttcccgccgaacagccgagcgtgtggaagcgctgcacatcgtcgccgaagttgctatcccaaacagaaacgtacacgccgccgggctgctgcgccgccgcgtggggcagataatcgtagtcggccgactcgttggcgaagcgctcgccgtttaggttcaccttgaggaagggctgtgttccgggattgaactggccgttcgatgggaactgcggattgcccgccttgatgctctcttcggtgtagcccgcgaccgtacccggcgtcacgaggccgcgatcgaagatcatcgttgccgaggtgaggtctttcgccgcaccggcccacattgccgccttgatgccgtcgccggtgttgttctggttgtatccaagtgcggtgacgctttgggttgtaacgggggagagtgcggtgagcatgtcggggttggccgagtagccgccggtcgtcaggagcacgcccttcgccgcattgatttgcacgtagccgccgtcggtttcgaagatcgcgccgatcacgcggcctgtatcgccgtcttcgcggacgagttttgcgagcttgtgcccgtaggaaacctcgtgaccagcttctttgatgtggttttcgaacaggatgttgcgctcttcgaagccgtcgcgtccgccgttctcatcggcatagtggtgctcgaacgggggagtgtagtacggcgtgccgcccatgccgtcgggcatgtcgaactcgtcggctatcacgtgggcaccggcggccgacatgatgccatcgacgaaggcgaacatgtcagcgctctcatccatccacattctgatcaggcgctggtcgcagttgccgtgcgaatagcggacgatctcgcccatgaggcgttggcggtcgacggagatgccctgctcggtaaagggcggagtgtcgagtgcggcaaaccagtggcgcgttgcccccaccgtttcgcccttctcgcagacgatgaaatcaacgccctgatccgctgcgtatgctgctgcggccatgccgccgttgcccgcgccgacgatgagcaggtcggtctcgcgcgtttcggcgatgtccccttcggcgatttcaggagcctgcccgagccagttggcacccaggtcggtggagttctgggcggctgcgcccgacgggtttgcggtggtgccgttcgcctcgcccgacgcttggctgctcggtgcgcagccggcgagcccaagagccgcaagcgcccctgcgccagccatgccgcccaagaagctgcggcgcgatattccctgcgtttgtatggtcgttcccatgttgtcctccttgtgtcttttcgcgcaaccggcgctgtgcctcggtgcgctttgacgttgcgagacgatggtatgccgctgctgcgttgttcgcaccaccccctctgggcggtttcgaaaccgggcgttcacaggtcgcctgctccccccagtggggtgatttacttcgaaaaatacgaggtcaatcacagaatgcttggctgtgccaccctgttttgggcaacttgtcgtacaatacccgaggaggtggagccggccatgggacacgcaagcgaccgactgagggagattcgcgcaagcgtcacgcgggaaacgcttctgtgccttgtcgccgtgctgctgatgtcgtttgaggggcaggttctcaattcgagtctgtacgctcatgttgcaacgtatttcggcattgcgcgagagatcaacacgtttgtcggcgcggcgttcgccttcgttcttttcgttgttgcgatgcgcaagccctctctgctggacaagcggttgattctgattgccacgctggggtgtttgctgacatcgaccgtcgttcttgagatggcaatgccgcttggcaacggcgctttcaccgttgtcggcctggctttctcgcgcatcggctcgctgagcgcaatggccttcgtcgcgatagccctctgcaagctgccttcgatgctatcgataaccgttgccgccgcgggcgggctgtcgctcggagcggtcgtgcaagcccttatgcctctgctgcccgtcgaggcggggatcatcgttgcggctctgtgcagtgcgatttcgatcgcgttgctgtatcgccctgccagaggcgctctcgatcgaattgcaagcagagaggcgccgatcgatctggagcttgccaaccccgaatccttctttgcgccgacgcacggcctgtttctctgcaccctgcttttcagtgtggcgtctgggtatgcgcttacgctgaacgaagtggagcatgctcccgcgttcgtcgatatcattgcggtcgtgcttgtcggcgttgccctgtggatgatcctttcccgcgtttccgacaaggaagacaagctcttttcattttcctgcttgctggtgatcgcgggctttctcgtcgcgccgctcacgttcttttcggagaccgcatcggccaatgcgctcatccgcatcggcatcgtgagcttcgatattctgctgtggcttgtgattgcggcggtgggcaggcgaaatgcccttgctcttctgccgacgttcgcgcttctgcgctgcatgaaggcgatcggcacgaatatgggcgcgatcgtcggacatacctcgaacgacctgatcggagtcgatagccagcctgctgccatcatggcgtcgatcgtgctctttgctttcgttgcgtttctttggatcggattcaggaagttcagcttcgtcgatgccatcaaagggatcgttgaggttggcgtaaggactgttgaagacgggcgcccatcatcgcttgcgagcaggagcgtctctgacgaaaaagccgccgaaaagggcaaagcgctttcggggggaggcgatcgtgcggctgcgggcgacggtggggttgcggatggcgtcatggctgcggggggcggcacggccatcgccgacggtgcgactgccggcgatgaggccgctgatgcaccgccgtcgattactcgaggagacgggtgcgcgggggacttattcgttggcgagcgtgatgggaccgacttgggaattcccgataccatcgaggcgcgctgctcgagactgggtgccgagcgcgggttgaccgaacgcgagaccgagatattcgccatgcttgcccgcggtcgcaatggcaggttcgttatggagcactacgtcgtttcgcgcaacacggtgaaaagccacgtcaagcatatctatgcaaagctcgatgtccactcgcagcaggagctcatcgatctcgtcgaacacgccgagtagggccggatcccgccgcctgtcgccttatctgcctcctcgcttccgatcggcgcttgccgcgacgtcggtgtacccggtatccgctgtcacgcctgccggattgacgccttcgccttacagcgccgccagaccgctgttggccattttctcgatgaagcgcgcgatgtcctcggagccctctttcatgcccgattgtacccacgagcgaattatcgcaaggcatccgtttgccatgaacgtataaaaacgactgagctcagagcttgtcaaatcgggtcgcgtccggctccacatggcgatgcttctctcgcggaacgtatcgacgatgcgcagcagcagatcgggatcgctgtattctccgaagaacgccatgcagagcttctcgtttttcgcgatgatcgtgcagatgtctttgctgaaggcctcgagagatcctccgttgatcgttgtgctcagcgagtgcatgatggtctgcgccagatcgcgctctatctcttcgtacagtgcgtagatgtcggtgtagtgggagtaaaaggtggctcgattgacgcccgcccgatcgcagagctctttgacggtaattttgcttacgggtttttcttgcatgaggtcgaagaagctgtcgcgaagcatcatcttcgtaaggcgcacgcggtggtcttgcttcatggggttcctgccttagcgctttcggattgtgcatttttcgttcgatagacaacagatcggggtcgaatgttggtttgctgacacttctcaatcatttatcggttgatgaatcgccatgatgcaatataactataaccgcgtaagataatcaacaccgtgttgccaacgagttgcatgtttgccgaatcaggcgggcttcggatgcgggatgccgaatgcggggcatcggatgcagggtgccgaatgcgggatgccgaatgcgggatgccgaatgcggggcatcggatgccgaatgcgggatgccgaatgcggggcatcggatgccgaatgcgggatgccgaatgcggggcatcggatgccgaatgcatgcattgttggcggcagcaaaggacatcgactgccgtggaccgttttgcatcgttcgtcatcgaccataagaagccgatcgtttggctgacgatcgcccttgccctcatcggcacggtgatggcgtttttggtgccgatcaactacaacctttccgattaccttcccgaatcgaccgaatcgatgcgcgccgtcgatacgatggaggacgagttcgggatggcggttcccaatgcccgcgtgatgatcgacgatgtgggcatcaccgaggcgctcgaatacaaggagctgctcgccgcggcggcgggcgtcgataacgtcatgtggctcgacgacgtggccgatttgagcatacccatcgagatgctcgatgcctccatggtggatcagtactacaaggacggccatgcgatcttcgatgtgaccatcgcttcgggtcgggaatcggaggcggttgacgccatctattccatcatcggcgagggcggccatgcttcggggcaggcggtcagcaccgccgagatgaaatcgatgaccataaccgaagtcgtcaacggcatactcatcctcgtgcctctcatcctcgtcgttctcgtcttgtcgacgacttcgtggatcgaacctatcctgtttctgctcgccatcggcgtttcggtgctcatgaacatgggatccaacctgttcatgggcgaggtgtcctttatcgcgttcatggtcgcccccgtgctgcagcttgcggtttcgcttgattatgcgatctttctgctccatgcgttccagcggttcagagagaccgaacccgatgcgaaatcggccatgcgcgccgctatgaagaagagcttctcttcgatcgcggcttcggcggcgacgactttcttcggatttgcggcactttgtttcatgcagttccagattggcatggatcttgggttggcgctggtgaagggcatcgtcctttcattcttatgcgtggtggtgttccttcccgccttcactttgatggcgtataagctgatcgacaagacgcatcaccgccgattcctcccgacgtttcgcaatgcgggtaagtacctcgcgccgctgcgcatccccgttttcctcatcgttatcgcgctcatcgtgccgtgctttctggctcagtcgaacacgcagttcacctatggcatgggatcggttgagggcagccagacgcgcgcttcggttgacgcgcgggccatcgaggatacgttcgggcaggccgaagctacggtcgtgctcgttcccaacaacgatatggcccgtgaatctgcgcttgttgccgagctcgagcagatcccccatgtgacatcggtcctctcgtatacgaacaccgtcggcatgacgatccccgtcgagttccttgacgatgcgataacgagccagttctactcggaccattacgcccgcatcgtcgtgtatgcagatacggaaaacgaaggcgacgaggcgtttggtgtggtcgagcagattcgtgcgaaatcgacggagtattacggtgacgagagcctctcggccgggtacgcgacgagtctctacgacatgcgcgatgtcgttaccgttgacaaccaggtgacgaaccttatcgccatctgcgcgatcatcctcgtattggtgttgacgttcaaatccgcaacgctgccggttatcctgcttgcgaccatcgaatcggccatcttcatcaatctggctgtgccgtatttaacgggcgattcgctcaactacctcggattcctcgtcatcaacaccgtgcagcttggggctacggtcgattacgccatcttgttcaccgataactaccggaaaaaccgccaggcgatggaagtgaagcccgcgcttgcgaaaacactcggcgatacgttcttcagcattctcgtgtcggcaagcatcctatcgatgacgggagccgtgctttggctcacgtcaagcaacaacatcgtatcggtgctcggcctgcttttgtgccggggcacgttgctctcgttcttcctcgtcgtcacgtttttacccggtgcgctgcgcattttcgacaaggttatcggcaaaaccacctggcgcgccaattttttcgacccgcgagcctcgcataaggaggaatcgtcatgaacgatgccaagaaatcaaaccgtttgctgcggatagctctttccggatcgcttgcgatcgcactgtctttcggggcgctgggcgtatcgtcgctcaaaagcgccggggctgaggagaaaggccgatccggtgttgccggccaagccgaatcagcggacggctcaaccggcttgcctggcgagggatcctcggcggcaagcggctctggtcagaacgcaacgcccaaagacgaagtggtctatgcgcgtctggcgggcgacggatcggtggatagcatctacgtcgtcaacgtgctcaaccccgagaagccgggggaagtaaccgactacggcgattattcggcggtcacgaacctcaccgataccggcgcaatcgagcagtcgggcgatgcggtgacggttgacgtgacgggcgaatcgctgagctatcagggggatctggcgtcgaagaaccttccgtgggaggtgtcggtggcgtattctctcgacggcaaggcgatcgatgcgtccgaactcggcggcaagagcggcaagctcgaggtggagatagaaaccaagcgaagcgatgcggtcgatgccgtgttcttcgagaactacttgctgcagatcacgctcgtattcgcttccgacaagtcgagcaacgtcgcagcgcccgacggtcagattgcgcttgccggttcgaacacgcaggtaacgtttacgggaatgcccggcaaggatggttcgtttgcggctacggccgatgtgaccgatttcgagatggacggcgtcagccttgcggccgtgccgttttccatggtgatcgattcgcctgacaaaggggagctgctttcgggtttcacgcagttgtccgatggcgtcgggcagctttccgacggagcgtcgcagcttgcgagcggcgcgcagagcctctcttcgggtgcaggcgagatggcttcgggcatctccggcattgccgacggcgtttcgggcattgcttcgggtgcgggcgatttggcttcgggaacgtcctcgatcgcaagcggtcttgaggcgtatcagcaggcgctcgaaggccaggcgcagcagtcccagggatcggttatcgatacgagtgcgcaacggcaggcttaccagaccgcgctgcagacctacgttgcggcatttgccgtggcctaccatgatgcgaatcccgatgcgacaagccaggaagcggcgatgggcgcggccgggcaggctacggctgcccaagcgggggaattgcagcaggcgttcgaggctctcgttgccgtcgaggcggccaacgcagcgtatgcggccgtctcccaatcgctttccgccgccgcatcggggctcggctctgccgatgatccgaacgggttggtgggcggcatcaaggcgctggcccttggggcgtcgtcgcttgcttctggcgccgatgagcttgcgggcggagcggcgagcgcggcgacgggcgcgaactcgctttcgtcgggtgcgggcgatctggcgggtggtgcaggcgagctagccgatggaaccagtagcctttatacggagattcaagcgatgcccgatacagtaagcgaagaaattgatacgatgatcgccgaatacagtaaaagcgatttcgagccgacaagttttaccagttcgaaaaacaccgatgttacactggtgcagttcgtaatggccaccgagcccatcgttgcacccgagcaggacgaacccgaacccgaaatggaagaagggtcgttctgggaccgctttttagcgttgttcggcatcggcaactagattggcaacggtcggccttgaaggcgaggcggttaagctcagccgcctacgaggaaagaggaaccccatggccctacccgcagccgacctgaataagaaggccgacaacaaaacgacgatggagctcgggcacgtgctgcccatgaccgccgaagtaaagggcgatcatctctacattggcggcgtcgacatggtcgaactcgctcgcgagcagggaaccgccctgtacgtgatggatgaggccgacatgcgccatcgcatggagacgtacttgacggcgtttcgcagccgctacgagaattccgacgttgtattcgcaagcaaggcgttcatcaacaaggcggcggcgaggatcgtcgccgaagaaggtctgtgcctcgacgtttcgggcggtggcgagctggccgttgcgcgcgcggcgggctttccgatggacaaggtgttcgtccacggcaacaacaagacgcccgtcgagcttcgtgaggctatcgaagcgggtgtgggatgcatcgtgatcgattcgcgcatcgaactcgaccgcgtgtcgaagatcgccggcgagctcggagtgacgcagagcatctacatgcgcatcacgccgggtgtcgaagccgatacccacgagtacatccgcaccggttgcgaggattcgaaattcggtttcaccatgcgcgaggattgggctttcaactgcgtgaaggacgtgctcgcagctcctaacgtgcggcttgcgggaatccacatgcacatcggctcgcagatattcgcgctccattcgttcaaggaggccatcaaggtgatggtcgagcttatggcgcgcatcgaagccgagtacggctacaggatcgaagagcttgacgtgggcggcggtttgggcgtggcgtacctggccgaagacgagccttccacgatcgatgatttcgccgaatgcgtgacgagtgcggtgagggagtactgcgccgaatttggcgttgctcttccgcgcctgctcaccgagccgggccgcagtcttgttgcgaatgcgggcgtgaccctctataccgtgggcatcctgaagactctgcccggcatccgcaaatacgttgcggtcgacggcggcatgtccgacaatatccgcacggcgctctaccatgcagaatacgagccggtcatcgccaacaaagcggatcaacctcgcaccgagatcgtcacgcttgcaggcaagcactgcgaaagcggcgatgcggtggttgtcgacatgccgatccagcatcccgatctcggcgatatcgtgtgcgtgttcggcacgggcgcttactgctacactatgtcgaacaactacaacgggcagccgcgccccgcgatcgttttcgtgaaagacggcgaggctcgcgtgaccacgcggcgcgagacctacgaagatctgatggcgtgcgatctggattaagggagacaacgttatggctgtgaaactcggattggttggcaccggcaccgtcggcggcggctgcatcgagatactgaagaaccacaaacaggcgtttttgcgccactacggcatcgacgtagagctggtgcgcgtgtgctcgcgcaaccccgagcaggcgatcgagcacggggtggaggatatttttacccaggattacaccgatatcgtgaatgatcctgagatcgacatcgtcatcgagctcatcggcggcacgacggtcgccaggaacgtggtgctcgaatcgctcaaggccggcaagaacgtcgtcacggccaacaaagcccttatggcaacctacggcgaagaggttatggccgccgcagccgatgccggcaaggaaatcgcgttcgaggcaagcgtgggcggcggcattcccatcatcgatccgatgaagcactctctcattgcaaatcgcatcgacaccgtgatgggcatcgtgaacggcacgaccaactacatgcttacccgtatggccgaagacgatatgccctatgacgaagtgctcgccgaggcgcaggcgaaaggtttcgccgaggccgacccgacggcggatgtcgatggactcgatgcagctgccaagatcgcgattcttgcatccatcgcgttcaactcgcgcgtgaccatcgacgacgtatatgccgagggcattcgcaacatcacgccgctcgatcttgaaatcgcaaaggacatgggctattgcgtaaagcttctggcgcatgcccatcgcaccgaagagggaatcgacgtgcgcgtgcatcccaccatgcttccgctcgaccaccagctttccacggtcaatggcgtgttcaacgccatcttcgttgtgggcgatgccgttggcgagaccatgttcttcggcgagggagccggatcgggtcctgcggcaagcgctgtgatgggcgacgtgctggaggtggcgcgccatatccagatgggcattccgccgattgtcggatgcacctgcaccgatgcgattcccatcgtgccgatggagaatctgaagaccaagtactacatccgctttgccgtggcagaccgctcaggcgtgctcgccgcaatggcgggcgtgttcgccgatcataacgtgagcgtgcattcggtcatccagcgcggcaaaaaggatgcgggaaccgtcgatttgacgtatgtgacccacaccgcccgtgagaagagcgtccgcgccgtgctcgccgacatcgcgaagctcgatgacgtgttgcgcgaagagccttcggtcatccgcgtggaggattaagccgttccgatggcaaaagcggcccgaagattcgggccgctttttgcgttgcgcgttatttgccgaggtaatccttgatgtattcgatagacatcattccgcttgtcagcgcgtagccgcaagttgctcccacgtagtccgtgtacgggtaggagaaatatctgccgctgtcttggcctgcaacgaacagacctgcgggggatggcttgttttcttcgccgatggcttgcagatgatcgttcactttgattccgttaaaggtgccgtcaatcggcgatatcactcgaaccgcataaaacgggccttcgtcgaggcggtgcaaaagctcgggtcttttgccaaacagcgtatcttcgcctgaagagataaccgcttggtagtcggcgagcgttctttcgtaggtgctgggatcgaagcccgccaattcgccgagttcctcaagcgtgtcggctttccatgcttggttgtgttcgagggcagcatccatttcatcttgcagggtgtagtaggaggggacgaggattctctcacgcattttatactctgctatgatgtcttctccgagtatgtcgtgcaccccgctgttaagcagcttgtcaaaatcgttctgggtgaaaataatgtagctggatccgactcggcgcattgccgatgctcctcgggcgagggcatgggttatgcagaacgtttcgttcatgtatcgcgctccggcggaatcgaccatgagaaaaccggtctggttgaggaatttcatgtacccggcatagaagtcgagcacgtcgttactgcagaactccgcaagatgcggcgagacttccgttgatagaacggcgccaacttctcggcacatcgaaatgccgtcgcctgtgtttgtggctactccgttcagatagaagtccgacgagccgagaatttcgttttgcatgcttttgtttccgccgaaaccgcctgtgcagacgagcactgcgggcgagctgatgcgcaccgtcgttccgtcctgctttgtcgcggagatgccccggacggtcccgttttcgactataagctcctcagccttcgtgtttagcagcagcgttgcgcctccggggatgatgtagttatcccacagcagctggaatttttcggtgccttttccgtaatcgtgcgcgatgctcgtccccgatgtttctttgggagccgaaaatcctttatggccgcattcgtcccaatgagcttgaagccagtcgatcatttcaccggaatgatcgagtacgttgtagacgaggcttgcgtcgcttttccagtagcagtaatccatcatgttggaaaacacttcttctacggtgacgtggttgccgacttgcgcgtcgagtttgcttcccacggctagcgccccggttgcgcaggagccttcccctgatattcgggccgttttttcgaccaccaccacgcgcaggccttcttcgacggctttgagagcggcggttgatccggcggttcccccgccgactatgcagagatccgcctcgtaagactcctctttcggttcgtggttggttgctttagcgaatccggctagactggcacctgcttccgcgagcgcttttgccgttgctgccgtgatggcggcggcggtcagggtggaacccgttacggtgtcgacgaaaacggattgctgttctacgacgtctttcggtatcctttcggttgcaggctcgaaaaacccgggagtatcggagcacgaggctacctcgatcgaaacgatgctcgtttcgtcgacggttactttgacttgggttggctcgatggtcgcggggcatccgaaccgctcgccttcgatgcttccctttttccatttcccataagcttcccctgtgtacgtgccgggcgccatggactgagctatgctctgcggatcaaaatggttgagctgattgggattggcccctgcttgcttgatcgcatccgttactccggcgataaccgcctgggaggacagggtcgcccccgataccgtatcgacatcgattgattgggtgtcgattatgacttggggaagaacgttgagggggatgtagctgatatcctcggtttccgagtgactcgtcacctcgatgctgtcgatgcggtccttggaaaaggtaaccgacatctcgatggttccgtgttttccttcggcttgcgcttgatacgtgcctggcgtgtagctgacggggcccgacttcgcatcggattgttgggaagcgcatccggaaagcccggccaggccgcccatgccgagcaggcctatgccggccatcccggcagctcctttgagaaattcccttcttccgaagcacatcgatgtcgacggttcgccggcggaatccggcacctcgttacctatgtcctttctttctgctgtttgctgttggctcatggcccctccttgattcggtttggacaggctcttgattttcgggcaaaggcgaaaagcgctcttcccatgagggtggtgggaagcctgtttcctctcaccatttatatgttattttcagcatcctcgtgtaacttagtgggttcgagccgattgattttgctgtggttttgctataccgttccttatgtatagggcgggggttttcggtatggttaatctcgaatcgacttcgcgggatgcgcaggcggatttgcaggttcggtctcttgaggcaacgtgcttttcgcttcgaacgttcatctcggtggcagttgggatggcttttttctggcaatttttcaggcatgctaatctggcgaatcttttcgatctgtcggctgttggggctgtgcccgaaatcgagatgtgggttcccgtctactatggtgctctgctgcttatcgccgtcgtcgctttgtttccagcagtggttcgccgtttggaaacgaaatctgccgtgacgctggtttcggttctcgcatcggcttcgtcgggcttgcttttggttctgaaggtgttcgtggatcgcgatagcgatttgctttacgtcgttagcctgctcgcggcaattgcctttgcggtatcgtttgtggccttgaccctgtcgtgggcaagttgctgtaaaaaccttgcaggtttggatgcgaaaggggttgtgtactgtctttgcgtttcatcgttggtaagcctggtcgtttcgttcggccttttctccctttcgccgatccccgaggttttccccgccatcgttcctttggcatcggctgtcccgctgctgtatgtaagatcttcgattgcgggcgagctgcagaacggttctaggccggtggggcctcgtcgggagttgccttctcgccgaatggcggctccaaggggccttgtggttgttctggtcatcctcctggtcatcgctgtttgcgtgaaaggcttgtacgacacgcttgtcgtgaacagcttcgaaacgggcctttacctcaagcacttcataaccattgtcgaacttgcgggcatcatggcgatttgcttgctttcggtgaggatggagcgggttgcctttctgggatggttcgtattggcaggcggcttggtttccgggctggtcatgatttcgctgtctgattccgacttgttcctccaggtggggttaggaacgatcaccgcggctcgtacttgctttgaagttttcgtgttcagcttggttgcggcagccatgggaaagagccctttgtcgcgaacgatgcttctgctcctcgtgattcccgaagcggcatcgtgcttgttcgggtattttgcgataccgaccgccttgcttgccgccggcttcaccgtgttgccgacggttgatttcatttctttgggcctcggtgtcgccgttgcggtgtgctcgtttttcgttgcgagctttcttgcgcttaagggaatcgacgctaccgccgacgtctcgaaaagggattccgtgattggcgcgaccgaggcgcgatctgaagctcgactcgactgcatagcttcggaatacgggctaactcctcgagaacgggagattgccgaatacgtattccgggggtatagcgcaaaacgcatagccgaacttcagtatctttctctcaacacggtgcaaagccacacgaagaacctctatcgcaagatcggcattcattcccggcaggatctcatagatctcgtcgacgagggagtcgatgagatcgcgtagcctttgcgttgccgcgccggtcatgcagcctgtgcgatctcctgcgattcttctgcggtgatgatcttgtatttcaccatctggcgaagaacctgctgctggcgttcggcggcaagctcggggttttccgttggcgcgtaggcggagggcgcgttgggcacccccgcgagcagggtcgcctcgtagtcggttagctcagaaggctctttcccgaaatagcccacgcttgcatcgtggatgccgtagtagccgtttccgaagtagatggagttcacgtacagttcgagtatcttttctttcgaaaggctccgttcgatgtcgaaggccatgagcacttcggcgactttgcgttcgagttcgcgtgcctgcgtgaagtattcgtttttcgcaagctgctgggtgatggtgcttcctccttcgacgaacgcccccgccttcagatcgtttatcagggcgcggccggttgcgattgcatcgaatccgggatgcaggtagaaacggtgatcctcgacggcgatgactgcctcgaggtacttctcgggaagcttgtcgatggtcgtgtatccgggtgtggcttctatctgttcggccatggcgccgacgctcgtggcctcaaccgcctcgctgtacatggagtagccgcgcgatacgtaaaacgccaccgcgcagaaggcgagtattccgatgatcagaagcagctttccgagaatcgaactgattgaccggtcctcatgtcgaggtgcggcgactacgcgcctggagcgcatgacgctgcgatagggggtgggggcgttgtacccggtagtacgtatgctgctgtgcgcgctattcatggtagtcacctgccgttctctgctcgttttcactggaatcagcatagcgcgactaccttgcgggtaccttacagggtgcttatgaacgtcttacacttttgtaagagaagggaaatacctgttgagaaggtagggactgcaaaaaagagcggttctttttcggttgcatcgcgcaggtttcgtttctcttgcggaaaatgcggcatcagaccgtcgatttggtatcctttttgcgaatggtaacctcagaaggagtatcaatggcgatcggtgcggtgtttgactgcgacggaacgttgctggattcgatggaagcatggcatatcgtgcagagcgatttggcccgacatacgggcatcgtttcaaccgatgagctcacagttgagctcagccccatgacgatccccgaagcgggagcccatctgcatgcgaagtacggagtaggcatcgatgccgacgatgtcgtctcgatgatcgacgagggtatgctcaaatattaccgaacccaggcgaagcctcgtctcggcgcgctcgaattcgtcaaggccctattcgattcgggggttcattgcagcgttgcctcatcgagcccgcagtcgtatctgcaggcgggtctcgaacgcgcggggttcgctccgtatctcgatgccatcgtatcggttgacgatgtgggggcgtccaagcgcgagccaacggtgttcaaccaagcatgcaagctcatgggcacgcagatttcgaaaacctggggattcgaggattccttgtacgccctgcgtacccttaaacgtgcgggctacaagacggtgggggtctacgataacgatttggcaggcaccttcgacgagctttcggagatcgccgatgtggccgtgcgatcgttcgacgaactcgatccgaagtttttcgcgcgatgatcagaggaaccgccgatcatcacggatcttttcaagccgtgggagtccgcctcgatttttgcaagtagttcaacgctgtgtaacttgttagtcccggcgtttgctatacttggtaaatcctagtatgcggatatcattaaatatgatcaatccgtaaatacatgaccaacggtctcatttaattcaaggaggaacgatggccgaagagaacaacgtaaacccgaacgggatacccgagcagcagccgtctgccccggaaactcccgctcccgatcaggcttctgccgccgctccgcagtccgagacccagccggtttccgccgatcagtacacggcgcccgagccgcctgctcctgggcaaaccaatcagtatgccgcgccgcagcagccgaccccgggccagtatgctgctccccagcagcccacgcaggccatgcccaatgcatatcaagcccagcctggacagcagcctcccatgggctatggctaccagggcggctacggtacgcctcaacctccgacatccgctccggttggtcccggcagcgggaaagcgctcggtgcgctgatctgcggcatctgttctatcgtgttttccggaacggtaatcatcagtatcattttgggcatcgtcgcaatcgtgctcgcttcgcagtatgtcaaatcgttcggtaaagacggcaaggcgacgggcggaaaggtgtgcggcgtaatcggcatcgtcttctcgatcctcatgctgatcatctacatcttctcgggcatcttggtggctgcggcaatcaacgaatacggcagttcatccggcccttcgtattcctattcgtacgacagcggatcgtcttcgtctaacgactcgagcaccgcaacgccgaccgatgccgatgagcaggctgccatcgcggctgcgagcgctgtgctcgacgagctgaagaaccccaccgatgccgacatcaacgagatggctgccggccttgacgagggattcgcttcgtcttcgggtcttgagagcctgagcgatatcggcgtcgatcccaaagagttctcgcagtggctgttgtccgaccttacctacgagatcgacgatgcgttcgtgtacagcgacggtaccggcacggtgtacgccgatgtgacgacgaaagactactacgagttcatgagcatcttctccgataacgtcgacgctttcgttgcgagcgacgagatcgcgaacatcgccgatgaggcggcggccaacgccaagatcggcgaactgctgaaagacgcgatggctcagacgggcaccaccgaaagcttcgtatccatcgaggttgtcaagagcggcagcacctgggttgtcgatagcgactcgctcgaagacctcgcccagagcatcttcgggatctactactaagcttcttttgctttcaggttaatcgacttcaggcgataaacaacgaggcggtccgtttgaaacggaccgcctcgttttcttctctcggcaagcttcgcgctcaagttgctacttccacggatcttcctcgtaagggtcgacctgctcgatgcgatcggaatacggatcgtagccatcatcgtcttcgttggccgctcgcacaaacggatcggtcctcgcatccgtgcgctttcgtttcgcctgcagcgcggcttgcgcccgacgtcgcgcggcttcgcgctcttcctcggtaaccacgcctagtcctcgtcttcgccgatcgttccaagatcgtagggcgttgtctggtagacgtagtagttgagccagttcgtatagagcagctgcgcctgagcccgccaggtcgcgagaggcggaagcgaggggtcgttattcgggtagtagtttacgggaagcgccacgtcgtcctctttgccaaggtcgcgctcgtattctttaccgagcgtctcggtatcgtattcggggtgtccgaatacgaagaagtggtggctgtctgtgctcttggcaatgtagacgcccgcagcgtccgatacggcaatgagttcgagcgcggggttcgcctcgatgtcttcggcatggacttcggtgtagcgagaatgcggcgccatgaaaacatcgtcgaacccgcgtacgaggggggatgacggcttcacaagcttgtgctcgaatacgccgaacagcttttcgggcagttcgtacttgggcacgccgtagtgatggtatatgccggcttgagccccccagcagatatgcaggacgctgtgtacgttcgtgcgcgaccagtccatgatgcgcgtgagttcgtcccagtagtccacatcttcgaaatcgagccgttcaacgggggcgccggtgatgatcatgccgtcgaagtgcttgtctttgatgtcctcgaacgaggtgtagaaggtttcgaggtgctcttcggaaacgttcttcgattcgtggctgatcgtttgcagaagctcgacgtcgatctgcaagggcgtgttggagagtttgcgcatgatctgcgtctcggtgacgattttcgtgggcatgaggtttaggagcagcagcttcagaggacggatgtcctggtgcatggcgcggtattcggtcatcacgaagatgttttcgctctcgagaatctcggttgctggaagcgaatcgggaatcctgatcggcataacgcgtcctttctgcttgccgcttcgtcagcgtagcaccagccgggtgcggcatgatgccagctggaacatggggtgcggccccgtaaaacgaacatgccctatgataccagcgagtgaatccgcgtgcgaaggcaaacaaagtttcgtcatattgagtctgtggcggcctccaccaagtcaagtagttcctgctgcgaatgaatgcccgaggcgccattgtcgcccgcgggcgaaaccccgtccgttcccaacccgtatccgcctttgcgaaggggcaggcgtataatcgatacgtccgatcatctttgggcgcggagtccgaaagaaaggggttgcggtatggtggaaatgaagtcagggtatgtcgattacctgggattcaagacctattacgagatttacggggagaagaagccgggcaaaaagccgctgctcatccttcatggcggcccgggcgatacccactactatctgcagaattaccgtgaaatggccgataaatacgatcgtcagatcatcttctacgatcagatcggctgcggaaattccaagatcccccatcaggaggacgatttctacaactacgacctgtggatcaacgaattctacaccgtacgcgacgctctgggcttagacgacatccatctgttcggtaactcctggggcggcatgcttgccatgatgtgcatgatcaagaacgacgaaggcgtgagctccatggttgtgaacggctccccggtcaacatcgccacatggctttccgaggcgaaccgcctgatcgagtacatgccgaaagagatgcaggaggctattgccgaggccgagcgcacaggcgattacgacacgcctcaggcgaaagaggcgtacaacgagtactaccgtcgtcatgtggtgggctgcgatccgtggcccgattacgtgcagctcgccatgagcgacgagatggtgggcgagtgctattacgtgatgcagggcgcaagcgagttcgtggtgacgggcaagatgaaagacttcgacattcgcgaggacctgcataagatcaaggttcccacgcttatgctttccggtacaaacgacgaagcgactccgtatgtcgtgaaagaggggtacgatcttatccccgattgcgaatgggcgctcattcagggagcggctcacatcggcaatgcgacgcatggcgaagagtacatggaggccgtggagaacttcatttcgcgattcgactaggctttgcgcgaaagacggatgattctgcatcgctttgcatcgatagggcggcttgggcgtacgggtttgggcgtatgggttcgagccgctcttgcattttcgtcggacaggcattgccaaggccttgatatgcacgttttttgccagattcatacatctgagcgcgtttgccagggcacaaaggtggggctgaatcttgccttcggcgtactataatgcgtttaaccaggtcacaggggattctgcggcgctttggtgaggcggccgagaccaagcggtgcgcacccgtgtatgaatctggcaaaaagtgtgcagatttaggcttcgagcgagccttggggcctcgctctgattggggcggcgtcccgaatcgtggtgcatcaagggtcttcgacggtgtgggcgccacctgcggtccggaggcgttttctcggcaatctcctgtggatttcggaattcgagtgcgcgaaacgcttcggcaacgcttcgcggtatataatgcatccactgagaacagcgagataacaaggagcatcacgtgagcgaaacgatcagcaccgtctgcgtccagggcggatacacgccgggcaacggcgagccgcgccagatcccgatcatccaatccaccacattcaagtacgatacgtctgagcatatgggaaagctctttgatctcgaagagtcgggctatttctatacgcgcctgcagaatccaaccaacgatcatgtggcggcgaagatctgcgagctcgaaggcggcacggcggccatgctcacctcgtcggggcaagctgcgaacttcttcgcggtgttcaatatagcgtctgcaggcgaccacgttgtttcgtcttcctccatctacggcggcacgtacaacctgtttgccgttaccatgaagcgcatgggcatcgagttcacgttcgttgcgcctgattgctcggatgaggagcttgctgcggcgtttcagcccaacaccaaagcggttttcggcgaaaccattgccaacccggctctttcggtgctcgatatcgagaggttcgcgcaagcggcccatgcgcacggcgtcccgctgatcgtggacaacacgtttcccacgcccatcaactgtcgcccgttcgagtggggggccgatatcgtcacccattccactaccaagtacatggatgggcacggcgtcggcgttggcggatgcatcgtcgattcgggcaaattcgattggtgtgcgcatgccgataagtttcctggtctgacgactcccgacgacagctatcatggcgtcacctataccgagcgcttcggcttggaaggcgcgttcatcacgaaggcaaccgcccagcttatgcgcgacttcggtgcgatacagtcgcctcaaaacgcgttttacctgaacctcggcctcgagagcttgcatctgcgcatggcccagcactgcaaaaacggggaagcgatggccgcatacctcaaggctcatccgaagatcgcctgggttcgctatccttcgctcgagggcgacgagtacagcgagctcgcgcagaaatacctgccgaacggatcgtgcggtgtggtgagcttcggcgtggtcggcgggcgcagcgcggccgaaacgttcatgaagaacctcaagctcgcgcagatcgccacgcatgttgccgacgcgcgcacctgcgtgctccatcccgccaatgcgacgcatcgccagatgaacgatgaagagctggcggcagcgggcatctcccccgatctcatccgtctttcgtgcggcatcgagggcaccgaggacctgatcgccgatgtcgagcaggcgttggccacggtatagagcgcttgctttgcgcacagggcctcgttcgttgagcgaggcctttttcggtgcggcgaacatgcgggtcgtgcgcgggtcgggagcttcctgaagcgcgcaaagggcggcaagaatcgatgacggatggatttggatgcaatcagcgaaaacagtgggaatagtctgcgcaagcgatacggagctggctccgtttctggagcgaatgcgcgtttcggcaacgacgaatcgggcgatgctcgagttccgcaacggaacgatcggcgcaacgaatgtggtcgccgtgtacagcggcgtgtgcaaagtgaacgcaacgattgcaacgcagctgctcatcgacgcgtttcgggtggatgcggtgatcaatgccggcacggcgggtggaatgcgcgaagacgtgaagctgttcgatacgattgtggcggagcagaccgcctaccacgatgtagcccatggcgtgttgacggagttccatccgtggctgtcgtcggtttacctccaggccgacgaaacgctgctcgatgccgcaagaaaacacagcatcgtatcggatcatcccgtgctgttcggctcgatcgttaccggtgaacagtttgtagagggcgataaaagggatgagataaacgccgcgttcgctccgctagccgccgatatggaaaccgcgagcgtggcgcacgcatgccatgtgaacggggttccattcattgcggtgcggaccatcaccgataccgccgctcacaacgggatggaaaacttcgacaagaactgcgaaacggcctcccgaatttcctccgaggtagtaatggggatgcttagcgaacttgagcgttcggctggctgatcgcggcaagatcgctgtttgcgctgctagggctgagctcgggatgacagggcatgtcgatggggttgatgccggatgccgttatcgggcgttttccgatcattaataaattctcaatcaaatcgcaatgtcgtatatattgtttcatcctgcgtcgacttgctaccatctcaatatgattttggtgatgacatacggtccgcgcgtcaggggaaattccgctggtcgagatgcggggcacgtgtaccagctgctggcttatacgaagctcgcgcggtcggaaaaagagtcgtcgcgaaaatcgcatgcaagtgaacctttcttttcttcagcatgcagcgatgcggcatcatgtcaccgggcttcgatgtgatgttgcatcgctgcatgctgggggcgcatggacttattctgacgactcccgaaaagtgaagcagatgcgcttttcggatgaattccgagatcggtttaacagagaaagcctatgaggaatcacggcccctcgctgaatcatttattgagaatttactagaattctaaggcatttagacacggtagaatcgtatttgctgcttcttgcttcgatcattggttgcaatgaagaaaaacgaggggactatcgatgaagaatgccgctgttaaaagccggcttgttgtgcggtttaccgcgttactgacccgcagggcagcgtcggctcgcagatatcgacgtttggccttttcggtgggagcttagaaaaagcctcgaccccaattctaccgtttgctctcagtgccataacggtctcggcgcgtacaataatttgcccgggctcgttattgacgaatccgggcaagacgctacctttaataaatcgcaatcttaacgctattctccgtcaatcgataacggtcgaccgtgggcttattctagtgtctgggagaagacgagaggccttttgaaaggaggagacatggagaaaagaaaactctttacgggggcgtccatcgtgatgctttgcagtgcggtcgggatcgtggctgcgcttgcgggctgcgcgccccaagcatcgagtgcgccaagcgaggaagtttcgcaggtggcaggtgaaagtgcatctgcggaaaccatggaggaatggggcgagttgtatccgctccagtatggctcatatgctgaagagacgatcaaagaaggcaaatacgaggggcactacgccctcaaacagaagcttcttgcgcctgccgttcgcgtcgagcgcactgatgggcagacggataccaagctcgtcaacccgtatgggacttacgacgatggtcagatcatcgtgagcggagtcgagtacgattccgaatcgcatcgctgggtggttgtcgaaagcgatctcgacgatctttcgggtacgcgcgaacgccagggctgctatgcgtgcaagtcgaacgtgttcgataccgtttacgaagagaacggggcgggcgtgttcgtcgaagagatgaccgacgagttcgtcgacaccatgaatgggcaggtatggagctgcggaacgtgtcatgacggcgatcccgcaacgaatgctcccgatgcgcagctaacctactggactcagctggcgcgcgagtcgttcgatctgctcgatccgaaggagcgtgcgtgcggtcagtgccataactctctcgattaccgctctcgtatcactgatcaggataagatggacacattcagcccgtatcgctacggattcgacatcgattcgctgtatgctgcagccatggaggatggaatctctacggtggacgaggacacgggcatcgttttgagctgcctcgatcatcccgacgtcgaattcctgcagggcagtgcgatgggcgagctcggtttgacgtgcatcgattgccatatgccttcgaccaccgattccgaatccggcaccgagtacacctatcacaacgcctcagcatccccgctggaaaacgagacggcgctcgagtattgcttgacctgtcataagaaccagggtattgagagcaccgacgcgatggtggagatggtcaaaggcaagcaggccgaagctgctgcgaccatcgcggagctcgacgtcaagttcgaggccgcctacgagctcatcaaggaagccaatcagaacggtggcgtcgacgaaaccgttctccagcaggcacgcgacgactattcgcttgcagaagcctactatcatgcaacgaagggcggcagggacgatggatccaaggttgttcacaatcctatggcgaccaccaactactatgcccagacaggggatctgctcgacggcatcgttgagagcctgagctaaagaccccgccgattcaagaacctccctaaggaagggcgctctcgtcgggcgcccttcctgtatgatcgccacctgcagccgtatgattgcgaaaacgcaatggttcccacctgctgcccggaattgaatcctgccataatcgttgatagagtttgctgggcgtcgggtttcgaatgaggcacgcggtaaaggtataggtgatgggagtcttatgagggacggtcatgcgacgaaccccatgcggttggcgattcgcctcgtcgtgcttgtgtcgattgtcatcgcggttgcggcgggtttgtatcttgcgtggagccaggcggctcaggaagaggcggtgagcagcaaggtgctcgccgaggctaggacgctcaacactgagatgcaggctgtgtgggactacatagatgcctcgcaaaacgccatcaactacaacgccgatggttcctatgatttcaagggcatctactgttcggttgcgggtaaaggtatcgcgaagcgcttcacaagggaatcggagggttacgcgatccgttacgttcgcgagaacccgcgctcgggaaccgacgagccggacgccttcgaagccgaggcgcttgcccgattcgccgaaggagcggcaacggagcactatggtatggaaacgttcgaggggcagccggtctttcgctacctgtcggcgctcacgatcaagcgcaattgccttgcatgtcatggggagcctgcgggtgagccggatgaaacgggatttctgcgggagggaatggcgcagggcgaccttgcgggcgcggtcagcatcgtcattcccatcgacgcgtacgagaaggaggcgcaggaaagcctgatcggatccgttgggttctttcttattctagctgcggctattgcgataataatctgcgttgcactcaagctgtgggtggccaagccgctcgagcaggcgaatgctcagttgcaggatgaaaacgaggagaagtcgaacttccttgcaataatgagccacgagctaagaacgcccctgacgtcgattattgcctttacagatatctgggagaaaaatgcgggcgtcgagggggcaaacgaagagaaacttgtgcgggagatcaaacagaacagcgttgctcttctgggtatggtgaacaacacaatcgatgtggcgcgactcgaagcaggcagcttcgaaatccaatacgacgatgtcgatctgatcgatgttatgaacgcagtgttctcggttgccgagccgcttgcgatcaaacagggcatttcgctgacgaaatcgatcgatccgagcattcccgtcatgaggtccgattgggaagccttgcgtaagataattctgaaccttacaagtaatgcgttgaaatttaccgaaagcggaggctctgtcaatgtgaaggcgagctacgacagcgctgcagaaacaatttccttggtcgtggccgatacgggctcaggaatcgcgagggaggatttcgcgaggatattcaatcgctttgcccaagcgagtacatcgagctcgtcggttcagggcggaagcgggctgggattgtttcttgtgaagagcctcgttgaaaagctcgacggaacgatttcggtcgaaagcgaagtgggtgttgggagtacgtttaccgtggtcgtgccgtgcgaggggtcggtgggaatcgaccatggatagcggtggtgtcggaaagaagcgagggatacgatgaagattctgcttgccgatgacgagctgagcctgtgcgatgctctggagataatccttgaggacgcaggttacagggtacggatcgcgcacgacggcgcacgggcgatcgacctgtttaagcgcgagtgccctgatctggtgatactcgacgtaatgatgccgaagcacgacgggttcgaggtatgcgaggccgtgcgggcgatcaaccccgatgtgccgatgctcatgctttcggctaagggcgacatcgtcgacaagaagagcggcttcaaagcgggggccgatgattatttggtcaagcctttcaacgacgaagagctgttgttgcgcatagaggcgctgttgcgtcggcgcacgcgggggggcgagccgggtgaaccgaagaagcttacgcaggcggtgcagatcggcgatctggttatcgatccgcttcgatacgaggttacggttgccgaccgcgtcatcagcctcacgcccaaagagtttcagatactcgcccttatggctgatcatccaggaaaagtatttaccagggaagatctgatcgaaagcatttggggaaaagagtacgaagcaggtgccatcagcattcccgtatacgtacgccgaatccgtgagaagatcgaggaggatccgtcgaacccccgctacctccaaaccgtttggaggttcggataccgactgggcgattgacgagtggggacgttttacgataaggcccattcagtaagaatttagtaaggttttagtcatacactgaaagaagcggtttatggctattacttcctcccgtgcgtatcgttcttcattgcaaggagcaaacaaagacgaggctccgttgcgcgggatggaataaggaggaatatctatggctggctatctcgaaagagccacgagtgctcgtatcagccgtcgcgggttcatgaaggcgagcgctgccgctacggcggcattggccgcttctggcggactgagcgcatgcgcgaattcggtgcagcccgttgccgaggtggaaaaaggggcatccgaggagaagtgggtgccggtagcgtgttggcatgggtgcagcacgaggatgtgcgtcaacaaggctttggttaaagatggcgtggtgatcaggcagaagtccgatgatacgcatgaggacagcgtggagtgcccgcagcatcgcggttgcctgcgcggtcggtctcagcgcaagcacgtctttggggcggaccgtttgaagtaccccatgaagcgcaagcattgggagccgctgaccggcggcgacaagagcttgcgtggcaaagacgagtgggaacgcatcagctgggacgaggcgcttgactacgtggctgccgaaatcaagaacgtcatcgaaaagtacggcaacgcggcaattcttgccgacggcaaaaccgatgcgtttttcaacaaaatcgggggatttacgagcttgtggggcacccactcgttcggcgcatattccattcccgtgctgtacaacggcttccgccacctcggacgagaaggcggccacgaccgtatggatttgttaaactgcgaaaccttcgtcatgttcgggtgcaatcctgcgtggtcgacgtgcggcattcattcatattattacggcttgctcaagcagaacggggcaaagttcatcggagttgatccgttctacaacgattcatacgcgttcttcgatgccgagtgggttccggtgcgccccggccaggacgatgcgctcatcttaggcgttgcttatacgctcttgacggaagacgatccccagagcaacccgcttatcgattgggattttcttgatcgctgtacgatcggtttcgatgccgatcatatgcccgaaggcgccgatccgcaggataacttcaaggattacgtgctgggcacttacgacggaacgcctaaaacgcccgaatgggcctcggcgctgtgcgggacgcccgtcgagcaaatcaaatcgctggcttacgagatcaagccatccaacaaggttgccatcatgacgagctgggggccgtctcgcatcaacaacgccgatcatatatcgcagttcttcatgacgctcggtgcgatgacgggccatatggggaaatcgggccatatgacaggcgtgagctgtgatggcggagcggctgacggcggtccgcgccttttcgcggttgggtcggatgggaatccgacggttgatgcccctatcgacgattgcatctgcagcggcgagctgtggaatgcggtgctgacgggatcctatacgtttaacggccgcatgatgaactacgggttcaaaaacattcaggtgccgggcgaaaagcgctcgtgcgacatccatctcatatacaactcaggccgcgctatgctcaactcgcgcgaggacgtgctcaagggtgtagaggcgtttcgcaaggtcgatttcgtcgtcacgcacgcctttgtgccgaacgccatggccctgcactccgatatcgttcttcccgtcagcactccgtgggagcgagtcggccgtgttgcggccgacggttctcgcgatgctgtggtgttccaacaagccgtgtgcgaacccttgttcgagagcagaagcgatcaggaaatcgtgcgggggcttatgaagcgtttcggcattgctgaagaagagctgttctgtggcagtgaaaagcagcagctgttcaaccagcttgccggaactacggtaatcggcgaggacggcaaaacgaaggaaacgcttatcaccatcacgcaggaggatattgacgagtggggagtcgagggtgcccctcaggagggaaagtatccgctcgccaaactgtgggacgacggcatctgcatcgtgggccgcaaagagggggataactacggctacatcgcctacgaagacttcgtgaaggatcccgaggcgaatcctcttgaaaactccgagagcgggaaattcgagatttattgccaaaaggcttccgacgttatttcgagcatgggatacagtgaggtttcgcctattcccgagtatgttgcaaaggccgatggattcgaatccactttctccgattttgggtcgcagaccaaaggcgaatatccgtaccagatgttcaatccgcgcagtcttcgctcgatcatgaattctttggtgaacgtgccccagcttaaagaagccatcgcgaatccggtgttcatcagcgcgcccgatgccgaggcggaaggagtgaaaacaggtgatgcggttcgcctgacgagtccgtacgggtcggctattcgcatcgcgtcggttacgaatcgattggtgcccggtacggttgccctgccccatacagggtggttggaatacagcgaagagaacaatgcggatatgggcggtgcgtcaaacgttctcatcggcgggaacgtgaccggccagggcacatcggggtataacagcgcaatcgtaaagatcgagaagttcgatggcgaagtggttcttgatgcggaaaagccgcagaacgttatattcgaggatggtgaataggcatggcgcgtaaaggattctatttcaatatggcactgtgcatgggttgccgtacgtgccaggtggcgtgcaaggataagaacgaccttgagatcggaacggtgtaccgccgcgtggaaacctacgaagtcggcgtctatcctgcagcgacgtcttaccagcttactcgcacatgcaatcactgcgaggagcccgagtgcgtgcgcgtgtgcccagtcggcgccatgcatgtcgatgaggccgacgggaccatccaacatgatgatgagacgtgcatcgggtgcaagaactgcgtaaacgcgtgtccgtacggagtccctcaataccgccccgatctgaagatcagcggtaagtgcgatgcctgcttcgcccttcgcggtgccggggaagagaacgcctgcgtcgccgcatgccccatgagggctttggatttcggcgatatcgaggagctgagggcgaagtatcccgatgccgttgatgcgatcgcagcgctgcccgatccgtcgaaaacacatccttcggtactcattgaggcaaagccgagctcgcttgaaaccgagttcaccgaaatcctcatatagtaaaaaagtcaagctgcggccggtgccggctggtgtcggccgcagccttttgcaaggagttatcatgaacgaacgcgaggctttgaccatggtactgcgctcccgggagttgctgtacgccatgctgtcgcggtgttttgggggcgagcccgatgaagccatgatcgacgttctgtcgagtacggagctcgatcaggtctgtgcggtgctggatgacgacaagggggcgctctcctctcttcgtgccgatatcggttccgaagttgcggaacgcggccttgaagagctccgccgggagtacacggtttgcttcgtcggccctcagacgttggtttttccttgggagtcggtgtatgtaaccggagaagagctcgtatttcagccgtgtaccttgaacgtacgcgatgcgtaccgtctcgagggctttgaggcgaacggcgagtcgcacgaacccgacgatcatgttgccaccgaagcggattttctggcaaagctggcaaagcgggcgacgggggagttcgagagcgctgaagctggtgctaccctcgcaaccctcgaggcttcgaggacattccttctcgagcatctgggcgcgtggatcgtcgatttctcgaacgctctcgagtcggcggggccggatggggcggtctattggcgaatagctcgttttgcagtagcattcgttgagaacgacaaagcgctgctcgaggagtttatcgaaacgatcgcttagcgaatgagcgttgcggcatgggatgggtcaggagcttcatgggaagggtcacccttaaaacgaaattcgtcgtcctccttgcggcgataatcgttgcgtgcctgtgtttgaaccttgcttggagcgtgcagggtggggaagagcagacggagcgggagctgctccagcaggcgcgggcgctttcggccaatatggatgcggcctggaacttcatgaccatcaaccaggatctcatcaattacgatagcgaaggcaattacgagttcaaaggattgcaatgctcgattgccgggcgaagcatcggttcgctgttttcccaggaaaccgattatgtgacgcattatgtgagccctacgccgcgaaacgaatccgacgaacccgattcgttcgaggcggtggctctcggggcgtttgcgaatgacccgaaccgggctgagtactatgccgtcgccgacggcgaaaacggccaggtgtttcgctacctcgcccctatggtgatggaggagagctgccttgattgccatggcagccccaagggggagatcgatgaatcgggttacccgaaggagggcctcgaggttggcgatttatacggggccatcagccttatcatacccatggagacttacgaagcggctgcctgggagaacacggcgcgcaacgtcgtgttctcgatcgtgctcattgcggcctgcatcggggtaatctatatcgcgttgacaacgctcgtaaccaaaccgctcggtcggttcagaactgcggttgccggggtggaggccggggatctttcggttcggcttgcctcagaggcgtcttcgctcgaagtgagcgatctttcgcgcgggttcaaccgcatggccgataagctcgaaacgctctatacgggactcgaagagcaggtgtctgaaaggaccgaggcgcttgagaaggcgaatcgggttctcgagcttcagcgaaaagacctcgaatccatgaacgaaaagctgctcgacgagaatcgctacaagagcgatttcctggccatgatgagccatgagttgcgaacccccttggcggcttcgatggcgtttaccgaactgctggaagaacgcagccgaccgcagagtgaagaagagcggcagctttggggggagatcgatgccaataacaaaaccctgctctcccttatcaacaatatactggagatggcgcgcatcgatgcaggcaaggaaacgctgcatttggcgcttttcgatataggcgatatcgccggcatgatgcagggtacggttgaatcactcgccaaccagaagggcattgcggtgagatatcggatatcgaatgcggtaccgctgttcatggttgatgctgaaaagctccgccgcattgtcgaaaaccttatgagcaatgcggtgaagttcactcccgaggggggtacggtaaccgtttcgggcgattttgacgcatcgaacaagcgggtggttatcgtggtttcggatacggggatcggcattccgcccgaggagcaaggcgcggtgttcgagagattcgttcaggtggatagctcgccatcgcgctcttacggggggagcggactcgggcttgctttggtgaaggagcttgtcgagatgcatggcggcacgatacgcttggaaagcgagccgggttgcggaagcgcgttcaccgtttcgcttccttccgatctggccgatgcgggatagacgcgacaaggcatggtccagtgcgcttcagaaaggcgataacgaatggataaggtgctgctcatagatgacgatccgagcctccagcttgccctttcccatgtgataagggatgggggttacgaattcttcttcgcatcaagcggtgaagagggtcttgccatgctcgatgggctgaaacccgatcttctgctgctcgatgttatgatgcccggtatgaacggctatgacgtatgcgcgaagatgcgagaaaagggccggaggatccccgtcatcttcctatcggcgaaaggcgatatcgtcgataagagcatcggtttcaaggcaggcggcgatgactatttggtgaagccgttcaacaacagcgagctgcttttgaggatcgaggcgcatctgagaaggcataaggatgaccttgcgttcgctcgcgccaccgcccaaggcggcagcacgagagtgggcgatttggaagtgttcttcagcaattacgaagtgctcaagaacggcgatcccattgaattgacgagcaaggaattcgaaattctcgcattgctggcgtcgaaccccggcaaggtgtacacgcgccagcagatattcgagcatatttgggaaacggaagcgaccatcgacgtcaactccatcacggtgttcatccgcaggatcagagagaagatcgaggataatgcctcgcaaccgaggtaccttctgaccgtatggggcgtgggatacaagttcgccgaacgggtgtagaaaaacgtgcagttgccgctcgccggcctcggtaagattctcgcaatgtgtatgaagaaaccataaataactctgtattagcaaataaaaatgcatattcatccactaaaatgcacgataaccgaataacgaacttgtttccttccccggatggaaaccgcgaaagcgtttgtatgtcgacaccgtagggctttgaaggtgcgacgtatgaacgcttttttcattcgcggtgcagggtttgtttgtttcggttgccatggaattgcccggagataacgggaaacgtcaggccgcgaggccgcagaaaggaggcatcatgttcgagaaggaaaacgatggtagcttgggagtcgtgacgattcgcgtagccgattcggcatcgggaacgtacgagatcagctcgtctaccatgcaaaaagttgctgctttgatcgcgcgcgaggaagagggcatgacggcccgcttgcggactccgctgccgatcaggttgccattctaatcacataggtttgcgtttggcggacgggcgggatcgagtcgggcggagtttgcaaaatcatgtcaggttcgatttccgctcgctccttatgtcgaggatggcataataatcaggtgatatacgatgtttgcgcaagagcgataggagcaaagtatgcagaagttcatcgctgaagaatcgttttgggagctgtttcccgatgccgccatcggcatcatcgttgcaagcggcatgaaaagcgccgacgaggttgatccggctgacaccgaagcgatcaagcgccttttggccgaagcgaacgagcaggcggataaatacctcacgagcaacgtcatttcggaaaacgagatggtgaaagtgtggcgcgaggcgtacagcaagttcaagacgaagaagggtgcgcgctgctcgatcgagaacctgctcaagcgcgttctcaagggaaatcccgtcggatccatcacgccctcggtcgatatctacaacgccatctcccttaaatacgccctgcccgtcggtggcgaggacatcgatacggtcgaaggcgattttcgtttgggcgtcaccgatggcggggacgccttcatgccgatcggtgaagacgaagaggatcccacgctgcctggcgagctatgctatcgcgatgacgcgggcgcgatctgccgctgctggaattggcgtgacggtcagcgctcggcgctctccgacgattccgaaaacgcgatcctcgtcatcgagtgcgtcgatcctgcacgcatcgacgtactgaacgaggcgctcgatgaatttgcagcgctcataagcgagcacctcggcgcgaagatcgaaacccgggcgatcgtcacgcgggacaatccggagcttacgatagcggaataggatagcgagggcgctttcccgcgttgaagcgaggggagcgcgcttctacaatgacttcgcgccgctgcaaaggcggtttccgacggcacgcgagcgacttcgcctacccgaagatgatcagcaagcccaacatcatgccgatgatgacgaagaaggcgggcagcttcgagcggtacatgagaattgcctgtgggatgatctcgccgaacaccacgtagagcatcgccccgcttgcgaaacccaggctgagcgtgaggcccatcgggccgatatcgcccagccagaagccgaaccatgcgcctatcacggtgggcagtccgcttgccgccgtgatgaggatggcgcggatgcgccccatgccgccgttgatgagcggcacggctacggccatgccttcgggaatgttgtgcagtccgatgagcacggcaagtacgatgcccgcgcccgtagccagctcgttttgggttgcaaagcccgcgccgatggtcatgccttcgggcacgttgtgcaacgcgattgcgcatgccatgacgatgccggccatgaacagcgaagatttcggatcgttgtgctttcggtgttcggccaggtggtcggcgtggatgagctcatcgagatcgtcgtgcgttttcggatgctcttcgcgtgcgacgtggggaacctccctcttcgttctgcggtcgataagcaggttgagcaggtatacgaccgcaatgcctgcgataactgccgcgcatacgatgaacaccgcgtgatccgataccacctgggccgattcgatcgattcgcttaaaagatcgaagcatacgatggaaagcatgacgccgcccgcgaagctcaaaagcaagctgaccgtgcggctcgaatcggtgcggaacagcgctccgatgatgccgccgagccccgtgcctcccatgcccgcgatgagcgtcaccacggtgatgaatgccaaaggatccatgattcccctacagctaaaaggcgcccgtgcaaatcgggcgccaggtttctcgtctgcatatatgatagcaaacttttgttagctcgggctaatcggcgacgagattatgcggctttcgggagatcttcatcctccgcatccgcgtcttttccgcctgaggcattttgctcgggagcttcgttgctgggggcgggagcatcgttttcgccatcggattccccgacgtaagttgcttttgcggcagcttcggcgaccgattcgggatcggatttggaaagaacgtcggttccgccttcaatcgcacagcccgagcaggcgcggtcgcgatgcgagttgattgcatcctgcagattgcggtgcagttaatggaatcggtcgccagcgatcccgattgtctgaagcagttcggcgttgattccgctgaaacaatcaagggggcgacgggcctcgagctgtcggacgaagaggttgccgacgtcgtcaaggtggtggagcctctgctcgaaggcaaggagctcgacatgggtgccgttatggaaaccgtgggagatttcctcggcgacaacccgagcgatttgctcggcaagctcggcgggcttttcgggggaaagtaagtgcaagaggctctgcgggcgatgggcggatccgtatgggaaccggattcagcgcagcggtcgcagatgtgtgaaattgcggggaaattgccgtggctggcggcgatttccccctattcgtattgacgtgcccatttcgtcatcttacaatgcaaaggttcgctttcaaaagccccgtgtggcagaaacgatgcggaagcgcaaaaggctggagtccagaccatgcccggcgcgtcggcgtaggaacccggcatccgtatgcgtctgcaacttttgaaaacaaacagcccgtaggccgggttagcttctcaggtcgcgggagcaagaaatttggaggaatgaagtgaagacgtattacgcaaagcccaacgaagttgagcgcgaatgggtcttgatcgacgctgctgatcaggttctcggtcgcgtcgccaccaaggctgctcatatcttgaagggcaagcacaagccgcaatacaccccgcacgttgatacgggtgatttcgtcgttatcatcaacgccgacaagatccgtctcacgggcaacaaggctagctcgaaagagtactatcgccacagcggttatccgggtgggctgaaggtcgaatccttcgaggaggctatggccaagcatcctgagcgcgtgatcgagcatgccgtcaagggcatgttgccgaagaacacgctcggccgtgcaatgggcaagaagctcaaggtctatgccggtgcggagcatccgcacatggcccagaagccccgcgagatcaagatggaggataactaatggcaggcgaagctttgtattacggcaccggccgcaggaagaacgccatcgcccgcgttcgtctcgttcccggcaccggtaaggttacggtcaacggccgtgacggtctcgattacttcggtcgcgaggctctcgtgaactacgcgaaggccccgttcaaggtaaccgacacgatggagcacttcgatgtgatcgctacgctcaacggcggcggcatttcgggtcaggccggcgctctgcgccacggcatcgcccgtgccctgctcgaggctggcgactaccgcggcgagcttaagcgcgccgggtacctcacgcgcgactcccgtatggtggagcgcaagaagtacggcctcaagaaggcccgcaagcgcccgcagttcagcaagcgctaagccgatacgctgtatcgaacacgaagggtccgcgagcgatcgcgggcccttttcagtttcatgcgaacgcgcgcgactgccctttccagcggttcgcgcgcacgaggcgggcaccgctgggctgcggatgcgcagccccgatggcggcgctgcgcgaaaccggatcggcgggctgtcgccatcatcggggtggaaaacccgtgccatgaaaacccgaaaagaccgccgaacctgtgctcggcggtcttttcaagaggtgcgtcaatagcttacttggagggtgtcaccgtgttgacgcgatcctcttcgggcatgggccctgcgagaatttcaagattggcgatttccttttcggcatcgccgcctgcggcattgatgcccgcgatgcggccgaacgtcaggcagcggccgtggttggtgccggggcagatggtggggtagtcgttcgagaagtactgaccgcctgccgcaccggcgacgtagaggttttcgatgggctggttgttctcgtcgaggatatggcatgcggtatcctggcgcaggccgcctgaagcggcgagcagcgtggagacgagctgccctgcgaagaacggcggcgtgtcgacgggccacatgatctcggggcgtttgccgaaatcttcgtcgttgcctttttcgcacagttcgttgtagcgggcgaccgtcgccttgaggttgtcggcgggaacaccgatctgctccgccagctcttcgagcgtatcggcttggaacaggagaccctgcttgatcttctcttcgcgcagtttcagctcgacttccatgtcgaacggcacgccgaagcggcggtactgctggtccgacgaaatgccgcccgagcgcccgtcgttgcaggattcggcgaacgattcaagcgagttggcatcgtagatcgtgaacgccttgccctcgggctggaacgatttgacgcacgatttcgattgcgtgttcacatcctcgttcatgaagcggttgccttcggcgttcacgtggaggaaattgtagctctgggcgcccgactcgaggtggatcgtcgagcagtgcggctcggattcctgcatggctccgccgatccacatcgcctgcttgtgcaggtctcccgtcgaaatcccgaaggggatgtacaggcggctgtcagcgttccaggtaaagggctggtagcgggtgcgcatctcatcgtcgtcgaggtaatcgcccgaagccacgatgacggcgttggcgttgatctgcatgtagttgccctcttcgcccacgatcgcgcccgtcaccgggccgtcgccgtcgcgcagcaggcgcacgcacggggtgtcgtagcggtattccacgccgagcttttcgcctttttcgatgacggcggggatgagcaccgccatgccgaggccggtcgagacgccgtcgagatagacgaagtcggtcgtgtcatcgtagaagaagtgcgtgatcggctcttcggtgtagtcgggccccttgtagtagcccgcccacagcgtggggtgcaggcctgaatcggcgacgaggtcttcgagccagtccatgcacgcgccggatttcttggcgaattgccagagcagcggttcctttacgcgtcccgtcgcccattcggtcaagcgacgtacgatgtgagcgtagtcggcttcttcgaaccagccttcctcgacgtactgcttcaccatgcgcgagccgtaggctgtaatgtggccgccgcgacccgaccaggttgagcatttgtcgatgcagagcgtgttcgccccgtattcggcggcggtaaccgatgcgatggcgcctgcgaagccgcagccgacgacgagcacgtcaacgtcttcggtgcccttgatctggtctgctggaatctctgcgggcggcgtcatgaacgaccattcgagagccgcgttcgcaccgagcggattgcctgcaagcgaagcgatgtcggcgctcgctccggcacccgcggtgccgttcgcccccgccttgggcgcttcgcctgacggagcacatccgataaggcccgcgcctgcggcccctatgcccgcaagtcctgcaccgatgaggaactgcctgcgtgatactcctgtcatgttcttttccatgattccccttcctcccgtgaagtaggttgtgcggctgctcgccgcgtggtttcgtccgtgccgcgcactcgttttcggcgtgcggcgcgaattcggagcggaactgcttccgtggcatcaccatagatcctgacgtggggttttgaatcccccgggtgcgggtaactttctgaaaaaccccttctacccctgcaggggtagacaggcgtagaccgtgagcgcgggtagggagcgggcggtgcgagcgcaggtagggaaggtgtggtagtattttcgcgtgaggctgcgaccgtaggggtgcgagggcatggagcagaagagggaatctcaggatgcggcgttgaccgagcggcgcgagcgcaggacgattctgcgcgatttcggacaggagatcgtcgcccactaccgtctctcgatcgggttcggcttattctggacgtgggtctggcttgtgttccagaccacgtttttcagccctgcgttccttctcgaatcgaccatgccgttgccagggtggatcatccccttatcggcgtacgccgtcacgtttctcgtgctgggcgggttgctcaggttcaagcgctacgcgccgaggggcgcctggtatctgcgcatgataccggcggcgatgtcgttcggcgtgctgctctgcggcgtgctcacgttttccccgctgctcgatccggcggtcaacacggtcgccttctgtttgggtgggttgatcatgggtgcggcgacttcgtgctttcatgtcgaatggggccgcatgctcggccatttggggccccgcaaaaccatccttcacggcatcgtgggcacggtgctcgcttcggtgttccttgtgttcataacttcgttttccgacgtgtttctatgggctatcgcgtttttcgtccccatcctcagcatgcgcttgctcaggctggaggcgcgttcggttcgaaacctctatccctgcataacaggcgataggctccatgttccgcgccggtttctcgccacgtcgttcacccaggggctctccctcggcatcgctcagacgattttgctgacgggaaactacgacggacccgtggtggcgcttacggcatcgagcttcgctctgtcggctgtcattctgtttgtgtgcgcgttgttctttcggatggacttcaaccagctcatttaccagatcgggtttctcgtcatggcgctcggctaccttctgatgtcgctgttctcgcccggtttcatcggtgcggttctcgtgcagatgacgggatatcgctttgtcgacatcatgatgtgggcattgtgcgtgtacctgatcaagcagcgtgggttgccgacgaactgggtgttcgccatcacgacgtgctttcttctgctcggccagcttactggttcgatcgtcggggcgctgacgattgccgccattccgctttcaggcgagggggcctacagcctttcggtcgtcatggtgttcgtgttgctcgccctcgcgctgcttttgtccgacaggaagaacctgcagacgggatggggcatggtccgtcccggcgatgcggaggcgctgcccggcaacttcgagatgggatgcaagctcgtctgccgacaatacgagctcacggcgcgcgagggagaagttttttcgctgctggcgaaagggcgcaatcgcgcctacatctgcaccgagctgactttgtcgaaggagacggtgaagacgcacatccgcaacatctaccgcaagatgggcatccattcgcaacaagaggtcttcgaagccgtcgaggcggagcagcgcaacttcggattcgaacaggaagtgccccacgaaatgcgaatctgaggggttctgaggttcgctctgttgggtgttgtttgatatgctggcgttatgcggttggtgttcctaaccgaagccttttcgggacagccgcctctttattggggcgttctggaaaggtggttcgaacgatgttgcgcactcgctccctctatcaatatagtatcaatagtggtatcattttatgaaaagggcggatcgcatcgtagaatcgatgcgcaggaatccccgaggagtcaagtttgccgatgccgtctatgtatgcgacctgtatttcggcgagcctcgcatcaagggcacgtcgcatcgtgtatatgcgatgccgtgggcgggggatcctcgagtgaatatccaaaacgaccatggcatggctaagccgtatcagattcgccaggtgatcaaggcaatcgataagctgtcgaaggaggtgtagcgtgggcgttgcggatagatatgcctatcgcgttatgtggtcagaagaagatggcgagtatgttgcaaccgtggccgaaatgccgtccctatcgtggctctccagcgagccgacggcggctctcgaaggaatacgcgtactggcagacgatgttgttgccgacatggaaaaggcgggcgagacgccccctgagccgctttcgagcagaagttactcgggcaaatttcaggttcgcataccgccggagctgcatcgcaagctcgcaatcgaagcggctgaagagcatgtatctttgaatcgcctggtggcttcccgtctggcgtgagaggtggctcagcaaccgcgcgcggttgcctgcgaacgtgcctgcggtggcgtttgcctgaaaagcggcagcgctgcgtgcgatgacctgccgatatcggtattccctatagacagagcccatatctgcgcacaaacaggcgaagaagctttatcatgtgttcgagaaaaaactaaccgaataggagttccgcatgctttccgagcgcatactttcgcgcctgatccatacaatgaccaagagccatctggcgctgaacccaaccgacgagaccatgatgccggcggccaaacctggccagaaatacatgctgtacatgcacgttccgttctgcgagcgcctgtgcccctactgcagcttcaatcgctatccgttccgcgaagatgtggcgcgcccctacttcgagaacatgcgcaaagagatgatgatgctcaaagatctgggctacgatttcgaaagcatctatgtgggcggcggcacgcctaccgtcatgatcgacgagctgtgcgagacgctcgaccttgcgcgcgagaacttcagcatccgcgaagttgcatcggaaaccaatccgaatcacctgacgcaaccgtggctcgacaagctgaagggccgtgtgcagcgcctttccgtgggcgtgcagagcttcgatgacgacctgctcaagcagatggatcgctacgagaagtacggcagcggggatgtgatcttggagcgcatcgccgaggccgaatcgtacttcgattccctgaacgtcgatatgatcttcaactttccctcgcagaccgaagacgttctgatggcagatttggagaagatagcgctgagcggatgccggcagaccacgttctctccgctgtacgtttcttcggcgacgacgcgcaagatggccgcgacgctcggcaagatggattacgatcgcgagtaccgctactaccagattctcgacggcgtccttgcaggcggcgatgaccccctgtttcgccgcacgaccctatggacgttcacgcggggcgatgagcgcgaaaaaaagcgcgtcgaggggccgcagatcgaagaataccaggtgaattacgacgagtatccggcgatcggcagcggatccatcacccatttgaatggatgcctctacgtcaacaacttcagcatcaaagactacaatgcggccatcgaaagcgggcacatgtccatcatgggaaaaactaagatgagcaagcgcgacctcatgcgctaccgctttttgctcgatctttacaagctgcgtctcgataagaggcagttcaagcgtgatttcgggtgcagcgtcgaggccgggcttcccatggaaatggcgttcatgcgcatgaacaaggcgttcgaaatcgattcaagcgacgagctgacgctgacgcccatcggacgctatctcaccgtcgtgatgtaccgccagttcctcagcggtatgaataacctgcgcgatcaggctcgggcggcgcttaaggggccggagcggcagctgctgttcggagacggaagccctgcgtaaccatcgcgctggggccgctgtgccgttttcaagataggggatctctttgcggcgccgctcggaatgggcggcgcttgcgtttgccgacgtgcgtctcgccttgccgatttcggtttgccgaattaccgaatatagcatggacatccatcagaacgatcgccatcaatgctagaatacgtgccacacgattttcaggagacgcctatgttattgtgcgcacactatattctgcccataacgtccgagccgatcatcaacggtgccatgcttgttcgcgatgggaagatccgcgacctcggcaaggccgacatgctgaaattgcgctaccccgatgaagaggtcaaggatttcggccttgcggcactcatgccgggcctcatcgatttgcatacccatctcgaaaacgcggtcatgcgcggcgtcgtgcatgacgttccgtatgccacatggatccaatcggttcacgaaaagggtcatcgcatggaggcgggcgattggtacgattcggcgatcctcgggggcctggaggcgctttcgtcgggcatcacctgcgtggcagatatcacgccgacgggcgccgcctgcacggcgactcagaaactcggactgcgtagcgtgatctaccgtgaggtcggtgcgctcgacaagcatcgcgtcgattacgcgatgaagctcgccgagcatgatatcgcccactggaaacaggaggtcgattcgagccgcataaccatcggcatcgcgcctgccgccctctatgtctgccatccctcgattttcgcgcgggtggccgagatggcgaccaagcacgacatgccggttgccatgcatctggcgggcagtcgcgaagaatacaacttcatcaagtacggctcgtcaccgttttcggttcacgagatggatcagaagcgcggttacgtggagatccccccatggcttcccacgggtacgacgcccattcgctacgctctcaactggggagcgttcgatgctcccaacgttatggcgattcattgcgtccatatcgatgcggaggatatcgagaaactcaaagaatacaacgtggcgatagcggcctgtccgcgctgcaacgcgcagctcggcatgggtgttgctcccatcagcgaattcattcgcgcggggcttcgcacgggtctcggcaccgattcgcctgccgcaaccgactcgaccgacatgctcgctgagatgcgcatcggcatgctcgtgcagcgcgcggtcaacgtgggcaagtttctcgattcgcagacgatgctcgagatggcgacgatcggcggcgcgcgcgctctcatgctcgatgacaaggtgggctcgctcgaggtggggaaggaagccgatgtcattgcggtcgatctttccggatcgcatcagacgccctcgtccgatccggtgtcggccgttgtcaacacatgcagcggcgcggacgtgctcatgaccatggttgccggcaccatgctgtatgaaaagaatcactggcacgtggatgtcgaggttgcgaagaacatcgcccgcgtgatcgaaatacgtggaaaattgaggatgtaaatggcgaataagaagcaaaaatcggcttctcagcaaagagcggatcacatcagggaagctcaggagcgcgaggcgcgcgccaaggcccagcgcgcgagatccgaaaagataaaaaaggtggttatcgtcgttgtggccgtgattttggtattggcgctatcgcttccgaccatggcgcttatggttataggcggcggctcgtagggtttttcgatactctcgacgtagtatcgcctctgtggaataatgctcatgcgcgcaaccgagcggtatcgcaacgaggtttgtgctactatgattcggttatggatagatgaggtgcgcacgcaataaggcgagcttgcaccatgagaatgtataggggttaccttgtttggtatcggtggattcgagcttttcctcattctgctgttcgggttcctcgtgttcggacccgacaagctgcctgctatcgcaaagacggtgggaaaagcgatcggaaaattcagaagcgctcaagaggagatgaacaaggtcatcaagaccgaggtttacgatcccaactccgacgagcccttcaagaacccgcttgacgctttgtcgaagatcagcgaagtcggcaaatcggaagagaagaccgagagcttctcggagcgtaaagcgaaatacgacaaagagcgtgcagcaaagaaggctgccgaagagaagaaggctgcagctggcacggcaacggcggcaggcgcggcggtagccgccaagaaggcgaccgacgatgcgaaggccgacgggaagaccgatgcgaagcccaagccgagcgccgacgagctgtacggcaacaaacccgctgcagcaaagaaaacgacgtcccaggcgaaggcgaaggcagacggggccgaatcggttgagaagaagcctgctgcccggagtgccgccaagccgtctacggcatctgcagacaaggcggctgctgcaaagcccgcgactgcggccaagagcgcctcggcctccaaggctcagtctgcgaagccggctgcctcggcggctacgaaggccacgacctccactgcggccaaggcaacggcatcgaaagcaaccgcaaccaaagccggtgcgtcgaaagccaccgcggcgaagacgtccaccgctgcgagcaaaaccgcttctgcggcaaaacctgcggcttcaacgactgcagctaaatcatcggcaaccaggtcgactgctgcgtcgaagtccgccgccaagcctgcggcttcgaagacggcggcgaaacctgcggcctcgaaaaccgcgagcaagcctgcagcgtccaaatctgcgacgaagcccgcttcgaccagcaaaccttcgactgaggaaaagggggaataagctatgcctatcggtccggcgcgtatgccccttttcgaccatctgagcgagcttcgcatgcgtctcgtgcgcattcttgcctgcttggctgttgcggtgtgcgttttctaccttgcgacaccgacgatttccgagttcttgattgcgccaatccgcgattatcttccaaccgatcttatcgtgatcgacccgttcgagccgttcgcacagcgtttcaagctggcgttctggacttcgcttgtggcctgtatgccggtaatcctttggcagatacttgcgttcttccttccagcgcttaagcccaacgagcgcaaatggttcgttccgacgttcgcggccgccgttgccctgtttatcttcggcacggtgttctgctatctcatcatcctcaaccccgcattcgagtggctcaccgagcaggcggtaggatgggagatcatggcgcgagccagctcgtatctggatatcatcatcaagttcgagcttgggttcggcttcgcgttcgagcttccgctcatcgtgttctacctcgtcatcttcgatgtagttccctataagaagcttcgcaacagctggcgaaccgtgtacatcgcgctcatggttatttcggcaatggtcacgcccgatgcatcgcccgttacgatgttgctcatgttcgctgcgcttgtggcgctctacgaagcaagcttgctgatctcgcgcatcgtgctcggcaagcgcatcaaggagcaaaccgctgcgtacgaggccaaggaagccgaagaaaaggaatggcaggaagaatacgccgccatgaaagcggaaaagaaaaaagacaagtaggcgccttgtcggtcgctttgccgatcggttcgctcggggctgcgatgctcccggcgcgtgcggatgggcgttcgcgataggattggctacgctgatcggtgctgcacgcaaaacgggtgcagcaccgattacactttcaggtacggatagccgcaattccaccgaacaggatggggtttgcgtaaacgaaaggttcgccacgtgcatgaattaggcatcatgaccggcgtcatggagtcggtagaaaccgctgcaaaagaagcgggagccgataaggttctcaagatcaacctttcggttggcgttatgaccgaggcgatcgaagacgctctgcgcttcgctttcgaagcgctttccgaaaataccatctgcgagggcgcagatttcgagatcaccatgatccagccgaggagccggtgtctcgaatgcggcatcgagtacgaacacgatcgtctgcacatgctctgccccgaatgcgggagctttgcaacccagctgttggcgggcaaggaactgcagatcgattcgatcgaagtggacataccggatgatggggcgtccgatgatacgagcgaaggagcgtaaaggtcatgcagattgacatcaagcagccgattctcgggaaaaacgacgagctggcaaagaagaaccgcgaactgttcgcccagcacaacgtcttcgttctcgatctgttggcaagccctggatcgggcaaaacctccacgatcctcgccacgatcgacgcgctgcgcgacgagttcaacatcgccgtcatcgaaggagatatcgcctcgagcgtcgatgcggaaaaaatcaaggctcagggcattgcagccgtgcagatcaacacgggcggcgcgtgccatcttgaaagcgatatgatacggcgcgcggttgatgtgcttgatcttgagcgacttgatcttatcatcgtcgagaacgtgggcaacttggtatgcccgaccgatttcgatctgggcgagaacatgaaggtcatgatcctttctgttcccgagggcgatgacaagccgctcaaatacccgggtgtgttccaggcttccgaggcgatcattctcaacaaggtagacacgatgcccgtgttcaacttcgacagcgatgccttctacgcgtcggtcaagcagctcaacccccaggcgcccgttttccccatagcggcgaccaagggcgaaggcgttaccgaatgggcggagtggcttgccgagcagattcgcgcgattcagtagcggcagagaatcggcaatgcgatcgaaaccttcgcgcgctatgcttgacaaggcgagatgaagcaagacggcaccttgcttgagtcgaaggcggagaaaggcaaaggcatgcaacctcaggaaaaataccgcgcgtgcgtacgcgctctgaaaaactacgctgacgaagccggattcgtcgatgccgtcatcgggttgtcgggcggcatcgattcggcggttgtagcggttatggcggccgatgcattcggggccggccatgtccacggcgttttgcttccggggccatattcgagcgagcattcggtcgaggatgcccaagagctggccgataatctgggggtttccgcatgcaccgtttccattctcgagccgttcgaagcgttcgagcgcgtgcttgccaaggcatgcggcggagagctttcggggcttgccgccgaaaacacgcaggcccgatgccgcatggtgtgtttgatggccctctcgaatgcctacgggtggatgcttgttaacacgggcaacaagagcgaggcgatgatgggctactcaacgctgtacggcgataccgctggagcgttcgccccgatgggcgggctctataaaaccgacgtctatgcagtcggccgttggcgcaacgcccaagcggccgacgcaggcgaaacgccgccgattcccgaaaacgtattcaccaagccgccgagcgccgagctggctcccgaccagcaggacgagaagagcctcggcatatcctacgacgatctggatgcgatactgatcgccgcaatcgagcacggcaggtcggtcgatgagattgcgggggagggcttcgatcgcgacatggtggaaggcgtgctggcgaaaacgcgccgcttcgcgttcaagcgcgccatggagcctccttgcccccaagcggcgttttaccggtagggtggttcttgtacgttgcgggcttttcaggattgcgcctcgttgctctccttctcggctttttcgtcttcggcggcaagctcgtcgacgatcgccttcccgacgatcattccgaacgccgcgttcgacgcgaggccgttggcgctttccgctgcgcatgagccgcagcagtacgcgttggccacgggcagggaagcggcgttgacgatttggcccgtatcgctggttttcagaccgccgagcgtcttgtagcgtacgggaaactgcttgatggcgtagtagggcccttcgagcggcttcaatcctgcttgccggccgaactcctcgtctttgcccgcctcgacggcgttgccgtacgcttcgagcgcatcggcaagcgcatcggcgggtaccttcatggccgacgcaagatcgtcgagggaatcgaacggtccgacaaggcgcttggccgatttgcttgaaacgtaggcgacgctgcgcgaaaggattccctcggatagctgtttgtcgaataccgtccaccaaaatccgagttcttgcgaaacgcattcggtcgccgatttgcccgcctggtcttcgcgggcgaaccgcacgccttgcggcgaaacgttcacgctcggtccgaacaggccccaggccgatacttggggaacatcgctggtgagcagcgcgggttggtccatctcggctgtttgcccgcccagggtggcgccgagggcgatgccatcgccgacggagtggacggttaggcatccgatggtcgtttggtcgggactgttctggttgatcatgtactggttcgagcagaacccgcctgttgccagcacgatttttcgagcccgcacgtcgagtatcgagtcggatttcgaggagaaaaaccgcatgcctacggggttgttcgcgccatcgaggatgaacgcgaccgccttcattccaagcgagaatgaaacgcccttgccggcaagcccttccttaatgggggacatgatgctgtccatatcgccgatgccctttttcggaagcaggaacgattcggtcgttgggcctttggcgtagtccttcgggtcggcgaaagatgcctgatagacgcttacggcatgatcgatccattccgcttgtgccatgacgaggctctgcttgaaccggagatcgtcggtgcttccctcttcctcgagttcggacttgcgctccttccaggcgtcttcggcggtcttttctataccggcgtttttctggatatcggttcccgaaacgtagaacagcccgttggcttcgtagctctcgcctcccaaaaggtcgcgcttgtcgacgacgaggaccgatcgcttttcctcaatgggaggcatagcggcggacaggcccgcgatgccgctgccgacgataagcacatcgacggtttcctcgaacgaaacctgcggcgagccgacaacgctttcatcgcttgaggagttcgtctcggcaggcgaggcaagctcggtttcgcaaccgaacagggcgccgccgatcgcaagcgttgcggccgaggccccggcaagcttgaagaattcgcgtcgttccattgcggcagcctgatcctttcgatgggcgaatgcgcagcactcgatagcgtgttcgtgaagaagacacccgagtatagggccctgcaacgcctcttgtcaccacctgtctcggcgaacgacgcaatctctccacggaccgtcgcaaaccgctggagctccctcgtatttctcgcccgcatgcttttcggatgccgccgtatcctgtacatagttacagtttgaatatactcttgccagagtatggcgaaaagggcggcgagtaacctactatacatgcatggaaaactttttattcaacaccaagaagatggaagccgccgattggctgttcgatgcggctgttgccatcggcgcgtttgcgtttggctgtgcacagcttcttttgaccatgtcgtcggtcgtgatgcccgacgagctgtttcgccagttgctcggtattccgaatgcgatgccccagaccggcgcctacgtcgccataggcttgacgacgcttcccctcgttgcgcggcgcaaatcgccgtggctcgtcttcatcttcgtcatgatagcgtttttgggaacccaggagattctggtagggtacaccctggccgttctcgggccgatcatcggcctgttcacgatcgcccacgagcgcgatcgaaccgaggcggtcgtcgcaacggtgctggcggtgatctcgctgctcttcatcgcgcttcccacgaacagcgaaagcctttccgacctcatgagattgcaaaacgtcacctacatggtggccgccgcgctcggcgggttcgcgctgcgcacgcatcaggaatacgtggcggaaaccgagcggcgcgccatcgcggcggagaagagtcgcgaggaggaggccgcccgtcgtgtcgaggaagagcgcgtgcgcatcgctcgtgagatccacgacataacggcacactcgctgtcggcggtgagtatccaggcggctgcggctgatcgcctcatcgacaaggatcctattgccgccaaagaggccatcggcacgattcgcgcgacctcgaaggatgcgctcgaggaaatacgcagcatgatcggcgttttgcgcagcggagatgcgcaggccgaaacggctccgaccgttggaaccgaacgtatgggcgatatcgtatcctaccttgaggacgccgggctgaacgtcgactacgacgactcgggattcgatcgcgaacgggtgcccgcctacatagatgtggctctgttcggcatcgcgcgcgaagcggccaccaatatcgtgaagcatgcgcacgcaagcggcgtttcgattcgccttgccgtggacggcgaggcggcgcgcctatcgatcgaagacgacgggcgcgggcgcaacgatgaagaaaccgacgggcacggcatagagggcatgaacgagcgggtgagcttgctcgatggtacgatatcggcgcataaccgcgcaggaaaaggattcgccgtgcgcgtgagcatacccttgggtgaagctgggaggaatcatggctgaggaattgatcggcgggtccgatctctacaacgacaagtaccgcgaaatgcaggagcggctgcgccagcgcagcgaagaggccgcgcgcatggccgatgaggcgctgagccgcggacccgagctgcgcgtggtgattgccgacgatcaggatcttgtgcgcaacgggttcaaactcatcctctcgtcgttcgagaacctgaaggtggtgggcgaggcgagcaacgggcgcgatgcggtcgagcgcgtccgcgaaaccaagcccgacgtcgtgcttatggatatccgaatgccgatcgaaaacggcatcgaggcaacggcggagatcacggctgatcccgaactcgctgatacgcacgtgctgattctgaccacgttcgatatcgacgagtacgtctacgatgcgctttcggccggtgcgagcgggttcatgctgaaggattccgagcccgatgatatcgccgatgcgatcgaggtggtagccaagggcgatgcgcttatacagccgtcgatcacgcgaaggctcgtcgagacgttcgtggaatcccgcgcgcgcaaagtgcactccgaaacatcgctgtcggttcttaccgaccgcgagcgcgaaatactcgcccttgtcgcccggggtctcaccaacgacgatatcgcagccgatttggtcatttcgcctgctacggtgaagacgcatgtggcccgcatcatgtcgaagctcggggcccacgatcgagcccagctcgtcgtgcttgcctacgagaacggtcttgtggttccgggcgcgtaagggctggctgaaggcccttgggtcgatgaactgtagagtccttgtgaaaccttagtcaaaggcgcttagataatctcattttttcttgcattggcttccgttggtggtaatatatcgcattgtttagcactcgttactcaagagtgctagcactccgctcaaacgagtggttaaatagtgcaacgtgacgtgattcagaaagagccgatcgaaaggaaggcatagatatgaatcttaaaccattgggtgaccgcgtgatcatcaaagcagatgaggccgagaccacgactgcgtctggtctgtacatcgcgtccgaggcgaaggaaaagcccacgaccggtgttgtgctcgcagtaggcgacggcaagctcgacaaggacggcaagcatctgccgatgcccgtcaaagttggcgacaaggttatctatgggaagttcggcggcaccgaggttaccgttgacggcgaggacgttctgatcctgcgcgctgacgacctgtacgcggttttcgcctagccttcagcttttttctcagaatatcagcgagtaaagcagttcgatcatcgaaaggaaatgagcactatggcaaaagatatcaagttcgaagccgacgcgcgcagcgcgcttgcagcaggcgtttccaagctggctgacgccgtcaaggtgacgcttgggcccaagggccgctatgtcgctttggagaaatcctacggcgcaccggttatcaccaacgacggcgtgaccgtcgccaaggaagttgagctggaggatccggtcgagaacatgggtgcgcagctcgttcgcgaggttgccgttaagaccaacgacgttgccggcgacggcaccaccactgcaactctgcttgccgacgttatcgtttcggaaggcctgcgcaacgtgaccgccggcgctgatgcgcttggcattcgccgcggcatccagaaggcaaccgatgcggtcgtcgaagagatcaagaacaccgcaaccgaggtgtccggcaaagagcagatcgccaacgtgggcaccatctccgcaggcgatgccgaaatcggcgagaagatcgccgaggccatggacgccgttggcaaggacggcgccatctccgtcgaggagagccagacgttcggcctcgagatggacatcgttgagggcatgcagtacgaccgtggctacatctctccttacatggctaccgacatggagaagatggaagccgttctcaaagacccctacatcctgttgaccgaccagaaagtcagcaacattcaggatatggtgccgctgctggaagaggttatgaagtccggtcgcccgctgttcctcgtcgctgaggacgttgagggcgaggctctcgctaccatccttctgaacaagctgcgcggtaccttcaactgcgtcgccatcaaggctcctggtttcggcgatcgccgcaagcgcatcctcgaagacatcgctgccgttaccggcgcgcaggttatcgacaaggacttcggcatgaccatggccgatgcgaccatcgatatgatgggccacgcgaagaccgtcaaggtcaccaaggataccgcgctcatcgttgacggcgcgggcgataagaaggccatcgaggatcgcatccatcagatcaaggccgaactcgagcgcgtcgactccgatttcgaccgcgagaagctccaggagcgcctcgccaagctttccggcggcgttgcggtgctcaaggtcggtgccgctaccgaatccgagctcaaggagaagaagagccgcatcgaagacgccctgcaggcaacccgtgcggctgtcgaagagggcatcgtcgccggcggcggcgtcgcgcttgtgaacgccattcccgcgctcgagaaagttgaaaccgccgacaaggacgaagaggttggcatcaacatcgtgcgcaaggcgcttgaggctccgatgcgcgccatcgctcaaaatgcgggcttcgagggcagcgttgtcgtcgagcacgtgaagagcatgaaggttggcgaaggcctgaactgcgcaacgggcgagtacggcaacatgatcgagatgggcgtgaacgatccggtcaaggttacccgcaccgcgctgcaatccgccgcgtcggttggtgcgctgatcctcatcaccgaggcaaccatcaacgagattccgaaggacggtcccgatctgtccgcgcttgccggtgcggccggtggcatgggcgggatgatgtaggccggatcggctgcatttcgtctggtgtctgcattgtcttgcgaggaggccccacggggcctccttttttgtgcgcgcatgccggactgcggggagccgtcgtgccgagttgcgggggcgtcgtgccgtacgccatcgtgcatagcgggggcggcgggtatgcaatgcgcgctttcacaaggacaaccgtgcgttcacgggctttggatcattcgtgcgcaaagcgcgcttcgtcacgtttcgtggcggcacgtaccagttcgttgcccttagttaaccttatatgtgaataattaagaaatagttatttatctgggataatgtgatgattaaacgtactttgtgaataatatatggcgatgcttggtttgccttgatgcatcgctattatggatcgcggacaaaacgaagtacgacacccaggaggatcatatgtctaccgaagcacgcaatctgccggatcagttccgccactgttcgaatctcatgcgccgtatgtaccatcagagcggtccgatgaatacccgccacggccagggcaagctcatgcattatctgctgtccatggacggcgcgacccaaaaggacctcgctaaagagatgcgcatgtatcccgcatcgctcgccgacgttgttcgccaggccgagtgcaacggcttcgtctcggttgccccatgcgccgacgacgcccgcagcacgggtgtgttcctgaccgacgagggccgcgctatcgctgagaagcgcgccgctgccaacgagcgcgttgccgaggacatcttcgccgatttcagcgaagaggagcgcgcgcaactcgaaggcctgcttgcgaagctctccgattcgctggagaagaaggccaccgagggcgacgacgaagaccgccgctgcaaccatcgcagccgccgcagccgccgctacgacggtcatcgcaagtgcggcggacgtcgcatgcgcaagaacgaccagttcgtttcaagagcgtagctcgcgctgggataccgcgcttcatcaagcgggcggctccggaaacggtgccgcccgctgctttctaggctacttttgcgcgtaatgtccgattgccgcatgggtgtcatcggaggttgtgaaatcaagcgaaacgtgagccccttcgagcgtgagtacgttcgaatcccggtacgaggtcagggaaaacagctccttgagttttgcgtcgtcggttttttgccccagttttatcgtttcctgttgcatgagcacaaccgtatactccctgttcgcatcggctggcacgctttctagcggagccggcttccacgaggaaaccttgagatcggcaacgaatgcggcgatatcggatttatcggtgagcacggataccgtcccgcccgttgacgcgtccataaaattgatctgctgggttttgtcggcgcctgcgctgtcgatgctgccgtcgatggcggaaatcgcctcgccgaacgaatccatcatgtcgatctgggcatcgcttaacgatgacattacctcgtcgcccacggtgccgaaaatatcgtctgccagccttgcggccgcatcggctgcgtcatcgatgtcttctttggtgatggggtgcagggtgtcgtccccatcgttgtatcccgcgacgcatccagagagaagcgcgcagcccattgctgcaacgagtgcgacgatgccgatctttacgtgagctctcatgtgttcctcctcgtgaaacgtgcattccctaagcaaagtacctatagaaatagtatttgcagctttgatctgcgcggcaggtcatgcggccattgtagcgacggcgtaaaatctccgttgcctgtttttaaggaatgtttccgaggatcgaggaatggcgggcatgggggcgcgcgagactattcgcattcgcatcttcgggtcccgttgttgtttggcagccgtcgaggcattcagtgcggttcggcaaggctgcggatcgtgaagaaaatgccgatgagcacttcgacgatcgacagccctacgaggaatcctgcgaggaaatccatcacttcgcttgctgggagtttggcgagggactgcccgatggtgagcgtcgtgattcccagcatgatgaccaggatgccgacaagcgttcttttttcgcgctgcagttgcccgatcgtgtcgagcgcttgtttcatgacggtttctgccgtgcttctttcccgatcggtctcgatgtcttttccgctcatgagctcgttgaacgaaacgccgagactttcgcagagcggctgcatgatcgcgccgtcgggcaggcagcggccgttttcccatttcgaaaccgctttgccggtgatgcccagctgctcggcaagttcttcttgcgtgatgccgagctcccttcgtttgagggcgatatagcgccccgtgatgcgtgcgtccatgagcacctccttgtgcgtcttcgatgatacgaagtaatgtgcgacgatgccaccgcttaaaagtagaatatggtagaactcgatcaagaacgagaggtggaccgaagacatgtctatagtgaagctcgatacgctggatgattcccgcctcgatgcctacgcgcgcctcaccgaggtgcagctgcgcaacaagctcgagcccgagaagggcatttttattgccgaatccgaaaaggtgatcgtgcgagcgctcgacgcggggtacgagcctgtctcgtttctcatggaagaaaaatggcttgatgtatcggcggaggtgatcgcgcgtgcaagcgaggacgttcccgtattcgtgctgccatccgacgagctcaagcgtctgacggggttcgagctcacgcgtggcattctttctgcaatgcgccgtccgccgctgccgagcgtggaggaccttctggtgcgtgcgaaacgcgtggccgtgctcgaaggcattgtcgaccacaccaacgtgggagccatttttcgttcggctgccgcacttggggtcgatgcggtgctcgtaaccccctcatgctgcgatcctctgtatcgtcgggcggtgcgcgtttcgatgggcacggtgtttcaggtgccatggacgcgcattggaaaaaccgttgtcgattggcccggagaagggcttgcccgcctgcgggatcttgggtttgcgacggctgcgttcgccctgaccgatgattctctttcgcttgacgacgcccggcttcgcgcctgcgatcggcttgccatgatattcggtaccgaaggcgatgggcttgcccgggcgaccatcgcccaatgcgagtacacggttaagatccccatggctcacggagtcgattcgcttaacgttgccgctgcttcggctgtggcgttttgggagctgcgctcgcggtagcggttgcccgtggcggagcatccgcaaatacagcgcggatctttgcgggaatcgccgcaaagtgtgtcaagacgttccctttttctgcgattcgtcaacggacgcgtatgcggggccggtgtgggttttgattctgctaaaatactctgccatggaaatcgtcttgcatatcttagagcattcgctgatcgacacgctgcggctcgtcccttttttgttcgtcacgtatcttgccatggaggcgctcgagcataaggcgggggatagggccgaagcggctattcgcaaggcgggggctgccggtcccgcgatcggcgcagtgctcggcgtatttccccagtgcggattctccgctgccgccgccacgctgtatgccggacgcgtgatcacgttcggtacgctgatcgcggtgttcctctctacttccgatgagatgctgcccatcttcatcgccgagcaggtcgatcccatcgtcattttgaagatactgggagcgaagctgctgatcggcctgatcatgggctttctagttgatggcgtcatgcgaatcgcacgtcggcgtggagccgatgacatgagcattcacgagctgtgcgagcgagaccggtgccattgccatggcggcggcggtgggattctcaagagcgccgtcaagcatacgctgcaggtaacgttgttcatcttcatcatcacgcttgtgctcgaagcggtgatcgagggcgttggcgaagacgtgctcgccgagttcctcggcgcgaatcccggcctttcggtgttcgcctcggcgcttgtaggcctcatccccaattgcgcggcgagtgttgtcatcaccgagttgtatctcgaggggactctggctgcgggggccatgatgtcgggtctgcttgtttctgcgggcgtcggcctgctggtgcttttccgcacgaaccgcccggcaaagcgaaacatcgccatacttgccgtgctctacggtatcggcgtggtgtggggccttatcatttcggccgcggggattacgttctaacggagaagcgcgttgcctttgtcaaccgaattgctatagtgggcataagacggataagcgtgaaacaggaggaaccatggcgaagcttgaagctggaatgacgcgcgacgaggcgttcgcgcttttgcaggagcataataaggatcccttccatatcgaacacggcgaaacggtcgagcagaccatgatgtacttcgctcgcgaatacgatcctgaaaacgaagagttctgggggattgtgggtttgctgcatgatctggattgggaagagcatgacgacgagcccgagctgcacaccatctatgcggccaaggacatcgaggctgccggcggatcgccggagctcattcgagccatccagtcgcacacgtccgatttcaataccgatctgccgaagcccgagcttcagatggagaagatcttgttcgcgaccgaggagcttaccgggctgatcggtgccgcgatcgtcatgcgtccgtcgaagagcgttatggatttcgaggtgaagtcgcttaagaagaagttcaaggacaagcgcttcgctgccggcgtgagccgcgatgttatccgcagcggcgccgaaatgctcggctgggaactcgacgaactgttcgcccgcacgatcgaggccatgcagtcgtttgcacccgatagggatacgttcgttcccgccgagtagggcggcgaagaaatcggcgatcggggcctccttgcggaggccctttttgcattctcatacgaattcgatccgaagctatgcgcccaacctgttgtctcggatgtacccttatggcaatcgatctggtacaattcgctggtcagcgagacgaggaggtgctgaatttggacgggatgaccgatcttctcatcagtataacgggcgcgatcagcgatgccatgtacacgtacgttttggttttcatgcttgtcggcgtgggagtgtacttcaccatacggacgaaaggcgttcagttccgctacatcaaggatatgtttgcggtgctgaccgagaacaagcacgttggaggcagcaggagcgtgtcgtcgtttcaggcgctcatggtctcgacggcgagccgcgtgggtacgggaaacatcgcgggtatcgccacggccatcgccacgggcgggccgggggcggtattctggatgtggctcatggcgctgatcggttcagcgtcggcgtttatcgaatcgacgcttgctcagatgttcaagatcaaagggccgaacggcgagtttcgcggagggcctgcgtactacatcgaacaggcgctcggaaagcgttggctcggcgttctgttcagcatattgctcatcatatgcttcgcctacgggttcaatgcgctccaatcgttcaacatgagctcttcgctcgagtactatattcccggatattccgaatcgcaggctccgctggcgttggctatcgtgctcgtggtgtttacggcgttcgtcatcttcggtggtgcgcatcgcatcagcttcatgacatctataatcgtgccgatcatggccatcgcctacatcgctttgtcggtatggattacggcgacgcatatcgatgcgataccggccgtgttttccctgatattcgaatcggcgttcaacttccagtcgatcttcggcggatttgccggctcggttgtggtcatcggcatcaagcgcggtttgttctccaacgaggcgggcatgggctcggcgcctaacgccgcggctgccgcatcggtttcccatccttgcaagcaggggctcgttcaaacgctgtcggtgttcatcgacacgctcgttatctgctcgtgcacggctatgatggtgctcgtgttcttcgtcggtggaacgcctggcgatctcaacggtatgccgcttgtccagcaggccatcaactattcggttggtgagctgggcatccatttcatcacgttctccatcttcgcgtttgcgttttcgagtttgatcggaaattatttctatgctgagagcaatatcaaattcatcaaggataacaagatcgtactgttcgtgtttcgtatcacctgcctcatcgctatatttttgggggcgcaatcgagtttcgatcttgcctggaacatcgccgatatcgttatgggcgccatggccttcgtgaatatcatatcgattgttctgctgggtaaatgggctctgcgcgcactcgacgattacacggctcagcgcaaaaggcatgaagacccggttttcgtcgcgtcgagcattcccggcttgccgccgacgcagtgctggcacgagaccgcagaggagctcgccgaacgcgatcgagccttgcggacgagggaagagcaggtctaaactgctcgttgctcgttgctcgttgctcgttgctcgttgctcgttgctcgttgctcgttgctcgttgctcgttgctcgttgctcgttgctcgttggcgtatggtgcgccggcgttttcgaggggtacgggaagcgcttctcgggttgattcgatccgagaagcgctttcttgttttacttccaacgcaaatagttttttcttcttcgctttgccgcgcgcgtctttcggggtcgcgggtcggcggtgacgtcgacgtcgatgcggtgtggtcgcctgtcctcctttgcgcgctttgcgcgaaaagcggcggtggcgagcaggccgagagccagtgcggcaacggctccaatcgcaagagcgaggccgctatcgcctgttcttggggaggctgctttttctctcgtacccgccgtcgcgggtagcgggtgttcgacgatgttgctggtgttgtcgagtgtttcgttcgagccgacgaggtctatcgcttcggaggcgaacgaagcttggtttgcgacggtgcggatcgatggagtggattcgacggcgattctgaacgaagcttcggctgcctccccggggttcaatgtaggtatcagccactcgatctggttgttttcgcgatcgtaggtgcaattctgcggcgttgattcgcctgcgaacgttgctcctgtcggcagaggatcgtgcacgagcacgttttttgccgcctcgtcaccttggttcgtggcaacgagcgtatagtcgatctcgtttcccgcctgtacgatctgccccgctgcgggagcggatgatttgacgacgttgactatcgggccgaaaggtttttcggctccgaccgagtgcacgacgcgtgcggtgatccgttcgggctcgggcagcgtcggatcgcctgcggtctcttgggccgaggtggtcgaataccgcgcttcgttgatgatcctgccggaggcgatagtctcgtttacttgtacggaaaagccgatcgtgcgctcgcttgcgggggcgagatcggtgagcacccattcgatgtaagggcttcgctcgtcggatgcgcgcacgaacgcaccctcatcggtggcggattcgaatacgtaggtggtcccctcgggaacgtagtcgcgtacgcgcgtcgtcggtgccgtgtcatctcccgtattgcgaacggtgatgagataggcgatgacgcttcccggatcgaccgccgatcccgatgccgggttcgctgtcttgtaggcggttgtcgtgtagccgtaaaccggatcggacgtatcggatgcatcggagatggccacctcgtgctctgcgaatgcatccccggtgttgtccgccgaggccgtcgcaatgttcttgaccgaatcccctgcggttgcctgtgggtcgatcaccgactcgtacgtaacgatcagcgcattttccgacgataggctggctccggtttctatcgaaaagccggtgggcacaccgtcgtcggataggcgataatcgatgcgcgttggttcgacggtgttaccgtcggcatcggaaacgacgatcgatcctcgcgctatttgcgctgccgatgcggcttcgagctcatctgcaatatgaacgttgcgtgctggctccgcctcgtcggtgttgcggattgcgagcgaatagcgcgctgtgcatcctggcgcgtatgctttgccatccgatgatttctcgatgacgagcgaggtgctgtcgggatcggcgctggcaaccgtgcaagaggcctgtgcgcgcggcgcatcgtcggcttcggtccaggcggtattgcccactgttcccgatggggttttcgccgcgaacttcgccttgtaggatacgatgaatttcgatgagtcggggaggtctgcatgcgtgttgacagtgaagccgacatggtcttcggtatcgttgtcgatccactcgatatcccatcccgaaaccgtgcgaccctggtggtcgcgaagggctaccgagtcttcgagcacaatcgcggctcgcgggctgtccgaggagaattcgtcgccaattcgtacatcatgagctgtttcacctgttcgcagacttgctacctcaatcgtgtattctgcgatctctccaatgcggtacgaacccctatcggcggttttcgctatgcccaaggccggccccgcaaccgaaacggtctcttcgtcggttgccggcaggttttcatcgcttgtgaccgcaatgcggttcgtagccgtttgcgaagcgagcgcctggtctgtaatcagggcttggtattcgattcggtaggcatgttcgcgctcgacttccaaagggttcagcgccgatgtttcgatgagcgctccacccgaatcgcaatcccatatgcgatggtttcccgtgttgacgagcgcgccgttcgtctcggccttccagtcttgcgttccgatgttctggacaatggtagtttggtcggtaacgatgtcgccgtcctgatcgctgaccacgatggagttgcgcaacagctccatgccgggtgtctcgaaagcgtcttcgaagaccacgttgttcgccagggtgccgcaagctgtattggacgcatcgatatggtaggtgacgacatctcccgtttgataggcgagcgaaggggcttgtttggatacttcgaggcgcggggaattaatccaaacgcgggcagctgggtcgttttgggtgggggcagtggcgtttttggcgtgtgcgactccccgggaaagcacttcgagaccgttcgcttcttccgtgggaacgcaagtgaacatgagacgaacgggggtatccgagggaaggcaggacagcgtcaaggacgctccacatcgatcttcctcgatttcggttgcgccgacgacgagtcgctgctcggtttctcggtggatgctgtcgtcgcagtgggtggggtaggagatgctgagcgactcgttttcgaacgccatgccttccatgcgaacggcgtcgggcccgtctgcgatggacatgccttcggatagtacgaggcttgccagcgcaagatcgttcgcgatggttccatcgacggtgttctcaacggtgagcgcaaacgttatcggctcgccgacgcgatgctcgtagctgttctcggtcgaaggcgatacggacacctcttcggtgacgacgagacgcggcgagttgatgaaaacctccgcctcgtcggttgcgggcagcgtttcggcgccggcgacacccgcttcgatgttcttcgcgtgcgcttctgccgtgttgacgacttcggttccgttcccctcttcggccgccgtcgcgcggtaggcgatttctatcggcttcccatagtcgaacgtcttcagctttaccgtccatcccgcttcggtttcgatggtttcggcgccttcgcatccggttgcttccactgatccgggcacgagcttcaacccttcgggcagcgtgtcggagacgatcgcttcgcgcgctctcgtgttctcgcgaatttgatcgaccgttgcatggaaggttatttcgtcgccgacgagaaactcgtattcgtcggcggtcgagggatcgggatcgctgtatttgttgattgcgagctcgggggaaacgagttcggtcacgacttcttccgttgtctgttcgatgccgttgatagtgcttttcgcgctgttcgaaaacgacagcgtgtcatcgtcggggtaatcgacaacctcggcggcgatttcgagatagtaggtttctcctgccatggccattccgttctcgcagaagtctcttgaaaactcgaacgtgacgagtcttgacgcctcatcgaagtgcgcggttccggcggcttcgagctccgcgcccgaatcatcgagcaaacgtgcgcctttgtattgcagcgtgctcggcagggcatcggataagatgagcgaatcgtaacggatgaagctcgttgcaccgaggtcgttgacttgctgggcgatgcggtatgtaaccgtgtcgcccaatcggacgccgtcagccttgtcggcggttttcgacggcgcaggcggcgtgattgatgtgagcgtcatgaaattggtcgcaaaccacatgctcccgtttgtcgcatagccatcgcccgcaattcctgcggttcccgaccacgaggcggttttgatcgcgtatgctttcgcatcgattgcgtttgaggcgccgcaatcgacggcgaagcaaaccgagcgccagtagaaggtctcctcgccgatcagatcggagaagtcgattttgctgccgtcgccatcgaatacgtcggggcatccgatgaacgtcgtgtagccgtcgttgtattctgccgttttgtcgtagagcaggctgcccggtaggatgctgtaaggggttttcactccgtttcggttgtagaggcgcgaggcggcgggggcttcgttgcttacatagcaggcggaaacgcggtcgctcggaaccgcgaacccctcgcctcggttgagcgaggtggcggttacgtacatgcgtccgagctcgagaggacttccggtgttcgcgtcgaagaattcgtagcgcgtgtcgaggacgtcggttcctacgaagaagacgccatggctgaagcacttaggtatttgaacgagtggatggccggtatagctttcgctgtaatctccctcctcgtcgatggatttgccgtcgcggatcgtataggttgtcttgagggcgacgggaacgctgaacgaagcgtctgcaatgtctttcatatcgccgatgtagtcgtagtaaacgctgacgcttgctccgtttgcggcagaggcggttttgtcgcaaaggaatccgaatcctggaattctatcagcgtttccgtagacgttttcagtatagatctgcatggcccgataaggggaaatgtctctgtcgggggcgtagcgcgatcctccatctgccaaggcgaccatcttgccgcccgaggcggagaagtcggtgatttcaatatcgttctcgtgatcggcgaggttgatgtatttaccctcgtcgaagaacgtcgtcctatcaaccgaaaccacgcctctcgcttggagcagatcggtatggggcgagccataggcgataggcggaccgcatatgagaccggctgcgcagatgagcaaagatacgacgaatacgagcatgcgaatcgggttgacgggcatcggcttcctccttggtgtgctttcgtgcgcttctgagtacgcgcaccgtggaagcaagcctatcgcgcccgtctttcgcggcagtccgagaaatccgagtgcgttttggcggagattgcgcgcaactgggaaggggtgcttacgagcttgtgaggtgctagagaagcaatgcggagtccgaagcgaagcgggagggagcaagaaaagatcaggggaggagcaaaaaagagcgatgctcggcgtgcatgttggcgagaagcttggcggtcgaatcgatcgaggccgacggaccgcgtctcgatctggggatgtccggttcgagacgcgggttatcgaatctggatgcggatgcacttatggtgttgtcggagaaggttgctccgttaatcaagctgctcgatgacgaagaaggacgcccgatcttccttgcgacctccatcgacgtagtcccgatagcgttcagcgaaatcgtcgacgggtgcgatgcggtacgagtgggtctcggttgttccgttcgaatacgtggccgtgatggcgagggtggcattgccgatcgcttcggcggcctttgtttgaacgagcacttctaactggctatgggcttcgttgtaggcatcctgctcggcctggggaagcggttcatggcgattggcgtcgatgcgtttcaggtattggtcgactactgccgttggttcggcgagatcttcgtcgacggaaacgttggcaacgatgtagatgtagcctttgccagggtctttgaggtcgcccggttcgacggagaagctgttgtggctgaagtcttcgggtgccgtgcttgtatcgcgggcggggtcgaaattgaagtaaacaccgtcgccttcaagttcgtaagttagtttttcgatgcccgtgccctcgcaggcaagatcgaagtaggtcgagcagatgtagccttttttcatgcccgtgtcgtgtatgaaatcgttttcgtagggatcggaatccttccaatcggattcatcgaagctataaaaaccgccccagcttgcgaaatcgccgagggcgagctttatattgtcgggtccgtcgaaatccgttccataggcataagctgtcagcgtaaaggagttttcttcgacgccgataaggtgttccgccgtcggcgcgagaaggattccgccgagcactacggcaacgacgcacgcggctgcaacggcaaagcgccggatgggccttcttgggggccggctctgccgcaacgggattgacgctgtggatgccccggatacctcagatgcctctgatgcacgttcgtcttgaatggcctgatcgatgcgagcgcgcgcggtttcgggaagcgcgacattgctcatgcgatcgcggtagtcgtcaaaaagattgcgtttcacggcttactcctttcttttccctcgttgcccgaggctccggatcgagtacatcgcgcagctgcttgcgcgcgcgaaagaggcgcgtgcgtaccgttgcgggatgcacgtccagtatttttgctattgaatcggtcgggtatccttcgatgtagtggaggtggacgacctctctgagtttttctggcagctgcgcgagtgccgtccatacgggatgctcggttaactcgtcgagtgcggaatcgccaaccgcccgatccgccagaggctccagattgtccatggtatcgactttgcgcttccaggcgcttcgatggtattcgcggcaacgattcgcggtgacgtgcagaagccacgctttcacatgctcgtcgtcgttgaagagcacggtgcttttcagcaagctgaggaaagcatcctgtgcgatatcctgcgcgtcggctgcgcagcgcgtgtgggaaagcgccagccgatagaccgcgccgccccacgagtcgagggcctgctgcatgaattgttccgaacgtagttgctcagccatatgatcacctcctcacatcatacatgcgccaggaggtcgatttgttccatgcgagggcgataatgtgcccattgcatttagcgatgggtgtcgaggccccaatgcggccaactcgcgttagggtagcattgctcatcgttttgcgttgaagcagagccatgtaatagtttccctttgcgaaaacaagctaaaaatggcggtcaaggcaagcttctgtcacctcaactgcgcccaagtcgcgtctaagctgcttacctgtcgacgtttgcgcaggtcggaaaattcgaacgctgaaaagtgcgccaaaaaggcatccgaagggcccgctgcagatcggatctttgacagaagcttgccttgaccgccattttcggatcgtttttccagaggaagcttgttggatgggtgattcttgcagagagcccctgcagagcgcccttgcgaagcactctcggcgcgagtccgttcggcgagacctgatttcaggggtgcatatccgtgcggagcacgtgttgcggggcttgcgcagcagcggcgaattcgggaggtcattcgtgcagcggcgcttggctcgggaggtcgcattcgtgcagcggcgtttgatccggggcattcgtgcaacggtgctggattaggcgtatccgagcgacgaacgtcagattcagtctgcagctcctgccgcgcttcaaaaaaaagaaactccccgaagggagtttgcctgaaactgcaatggctggcccaccaggattcgaacctagatagctggtaccaaaaaccagagtcctgccgttggacgatgggccagtgcgattgcctttccgccatgtgcgaaacggcaggtgacgcgtttccagcgcagagccaaggtaaaagtggtgggccgtgagggagtcgaacccgcgaccttgggattaaaagtcccctgctctaccaactgagctaacggcccactttttgcctgaacagcatatgcatgctgcatccgcgaaacgcgactccttattgtagcggcgagcccgaagtcggtcaatgagaattatgcgatactttcagacaattcttctgtgcagcctgtgtgaacgaagatattgtgtgcttgcatggtggcctgcatttttgatatcatctacgtttgtcgcttaatgacctatttgctttaaggagcacttttgaccaaagaagatgtaatcgagcttgagggtacggtcctcgaggcattgccgaacgcaatgtttagggtagaactcgagaacggccacaagatattggctcatatctccggcaagatgcgcatgcactatatcaaaatccttccgggagataaagtaacggtagaactttcagtgtacgatctcaatcgcggacgcatcacgtataggtacaagtaagcgataagttcccgcgcttcgggtttccgaatgtgcggtttttgtgtgcttgcacgatgcaagtgcgcagaacaaacgtgtggatcagcccgatccgccataagagacaacaatcacctgcggctgggtgtggctatacagtaaagaagatgagggtcgctttagacctgcacaaaccgaaaggaatttattatgaaggtacgtccttcggtcaagaaaatgtgcgacaaatgcaagattatccgacgccacggcaaggttctcgtcatctgcgaaaacccgcgccacaagcagcgtcagggctaggaagaaagaggagaaataacctatggcacgtcttgttggtgtcgaccttcctcgcgataagcgcattgaagtcggcttgacctacatttacggcattggccccaccacagccaagaagatcattgcagaaaccggtgtcgatcctgatattcgcgtgaaagacctgagcgaagacgatctgaccaagctgcgtgattacatccaggacaacctcaaggtcgaaggcgacctgcatcgcgaggtttcccagaacatcaaacgcctcatggagatcggttgctaccgcggcttgcgtcatcgtcgcggcctgcccgtgcgcggtcagcgcacgcacaccaatgcgcgcacgcgcaaaggtcccaggaagcaaatcggcggaaagaagaagtgaggtaattaagtggcagcaaagaagaacgtgcgcacgcgcctcaagcgttccgaacgcaagaacatcgccgtcggtgcagcgcatatcaaatctacgtttaacaacactatcgtgagcatcaccgatcctcagggtaatgtgatctcgtggcagtccgctggtacggtcgggttcaagggctctcgcaagtccaccccgttcgcagcgcagatggctgcggaagcggcagcgaagaccgcgatggagcacggcctgcgtaaggtctccgtgttcgtcaagggtccgggttccggtcgtgagaccgccatccgttcgctccaggctgctgggctcgaaatcgccagcattcaagattgcacgcctatcccgcacaacggttgccgtccgcgcaagcgtcgtcgcgtttaactgaaaggatctacacatggctcgatacacaggggcggactgcagattgtgccgccgcgaagggacgaagctgttccttaaaggcgatcgctgctatacggacaaatgtgccttggagcgtcgcaactatgcgccgggtgaagccggcaagaagcgcgtgaaggaaagcgaataccgcaatcagctccgcgaaaagcagaagaccaagcgtatctacggtgtgctcgagaagcagttccgtgggtattacgatctcgccaaccgccagcagggcgtcaccggcgagaacttgctgcgcatcctcgaaagccgtttggacaacgtggtgtaccgtctcggtttcgccaagtcccgcgcagaggctcgtcagcaggtccgtcacggtcatatcaccgtcaacggcaagcgcgtcgacattccgtcgttccgcgtgcgtccgggcgatcttgtcgccgtggctccgaaggccaaggatatgcttgtcatcaagagtgcgctcatctccaacgagcgtgtgcaagtccccgcatggctggaagtcgacatcgagaagctgcagggcagtgtgctttccctcccgcagcgcgatcagatcgatctcgacattcgcgaacagcttattgtcgaactttactcgaaataacattgcggcatactagaaggaggcttacacaatatgacagagttcatgaggccgacggtaacaacggaagagattaacgagaccgttgctcgtttcgttgtcgagccgcttgagcgtggttacggttacacattgggtaactgcatgcgtcgagtgctcctttcgtcgctggacggtgcgaaagcaaccgcgatccagctcgagggagtgcagcacgagttcaccaccgctgaaggcgtgatcgaagatattaccgacatcgtgctgaatgtgaaaggcctggtgttttccgcactttccgatgacatcgaagaggcgactgctcacgtattggctgaaggaccttgcacggtcaccggtgcggatctcgatatccccaccgaattcacgctgatcaaccccgagcatgtcattgccacggttgccgacggcggtcagctcgatatgaccatccgcatcggcgtcggccgcggctacgtctcggctgagcgcaacaagcgcaccgaggatcccatcggcgtcatccatgtcgactcgctgttctcgccggttcgtcgttgcacgttgaacgtaaccgacacccgcgttggccagcgcaccgactacgataagttggtgttggaggttgagaccgacggttccatcgccccgactgaggcgatctgccgcgcgtctaacattatcaaccagtacatgggcgcgttcttgagcctttccgataccctcgaggaagaggaaggcgaggttgcctcgatcttcgctcccgaaggccaggagagcaacgcggaactcgacaagcagatcgaggatctggacctttcggttcgctcctacaactgcctgaagcgcgcgggcatccattccgtgcgccagctcgtcgagttctctgagaacgaccttttgaatatcaggaactttggtgcgaaatccatcgaagaggtcaaagataagctgatctcgatggatctcaatttgaagctataggagttagataacgatgagacactataagaaaggtcgcaagctcggtaccgacgcgagccacaccaaggcaatgaagaagagcctggtcggtgcgttgttcctgaacgaccgtatcaagacggtcgatgcgcgcgccaaagagatccgtggcgatgtcgacaagatcatcacctgggctaagaagggcgaccttcattcccgccgtctcgccattgcggcgcttggcgacaaagagctcgttcgcgagatcttcgagaaggtcgagcagggcatgttctccgatcgtcagggcggctacacccgcatcatgaagctcggcaaccgcaagggcgacaatgcccccatggtcatcatcgagctcgtgaccgagcccgtgaagaagaaggcggaagagaagccggctgcaaagaaatccgccgccaagaaggcttctccgaagaaggccgagaagaccgaagaggccaaggctgtcgaggctgaagaggccaaagaggccgccgaagagctcgagcagatcgaggaggcagtgaaggaggaagccgaggcttccgtcgaagctgccgatgaggcgggcgacaccgaggccgccgtcgaggctgccgagaccgctgctgaggctgcggaggccaaagaggaaacccagaaggctgaaaccgctgctgaggaaaaggctgaagaggccaagtaagcgcagcgcttgcgaacagcatagagctgaatcagacgggggcttcggcccccgttttctgtgtgcggggctggttgcggccaaccgattcgacggaccgcatcggcttgcgcttcctgacaacgggagcggagcatcggcggcaaggggggtattatcggaggtgcaagcatgttcaaaataggggagttctctcggctgtcgcgcatatcggtgcgaatgcttcgtcactacgataagcttggtttgctcgtgccggctgaaatcgatgcgaaaagcggctatcgcctctattcggtggaacagcttccccatgccaacaaaatcacaacgttgcgtgacatgggattcggcatcgaggatatcaagcgattatcgacgcttgatgacgaggcgctggcaaacgaactggaaagaaggggcaaagagcttcgcgcagatatcgagcgaagcgagcggatgctctccgatttggaaaatcttagacgtgcggtgcttacaggctcgagccttttcgactacgaggtatcgctcgtatcggttcctgcctacgatgtcgtctctttgcggatgaccatttccgcctacgatgacgagcgtctggcgtgggaggcgcttggcgcgtacatgaaggcggaaaggatatccgtttccgatccgtacatcgaattctgcgagtttcataacgaaggcggcgaaggcgagggcgtcgacattgaagttgccgtagctgtcgatgaaacgcgcgaaggctcgggggcggttcgcttttaccgaactcaggcataccccgaggttgcctcggtcatgatatacggtccttacgagaacatcgcttcggtgtatgcgtcgttcgcccaatggctcgaagctcatccttcgctcgaaatggcgggaaacacccgcgagatcgcccatcgcggctgctggaacgcggatgatccttctgaatacctgacggaattccagatacccgtccaaacgaaaaccgcgcggagctgatcgctgctcgtctgttgttgcggtgcgggcgactcgagggtcccggcatcagcctgcaggtcgatacggtgcgtctcatgcgctcgttttctgctgcgccgaaacatcctgttgaccctgacatgatgtcagcctgtatgctccttgagccaatcgaaaggagcagcttcatgaaagagataaccatcaatcctatcggcgagatacgttcgggagaatgcgggcaggtcatcgcaatcgacgaggcctgccgggcgggccttcgcggtctcgaaggcttcagccatctcattgttttgtggtgggcgagtggggccgatgaacccgagtaccgcacgcttctcgacgcgggaatgccctaccggaaggtgaaagcccccttgggaattttcgccacccgctctcccatccgaccgaacccggtatgcgcatccgttgtcgatgtggcggatctcgatatcgagcggggatgcgtcagcacgtactacatcgacgccgagctgggaacccccgtcatcgacatcaagccgtacacgccgagcgtcgatcgcgtggcgagcccctcggttcccgcgtggtgcgatcactggcctgctgatgttgagacgtcgggcgatttcaactgggatgcagagttcacgttctaattgaaaccccaggtcatttatcccccaaaacgggccaaaggttgaaaaccgaatgtagccccgttgcgggggataccctgcttcctgatttttcatagagtgcggtgcgagaggagcgggcacaagccccgatagggaaatcctcttgcacgcatgttcggcatgcgccccatccgcgggcaacgggtgcggatgggcgaaaccagctgcgtgaaaccatcaggaagggagaaaaaacatggaattggatcgtaggaatttcctcaaaggcgctggcgtcactgccatgggggctgtggctgcggccacgctcggggcgtgcgcgccgagcggcgatgccggcaagaaggatgttgaaacgcccgtgtcggccgacggggaggaatatctgaccgcagaatccatgaagcgcaaatggtcgttcgagattccgcccgagccgattgcgggggatgatatcgctgaaaccatcgaggccgatgtggttgtcgtcggagccggtacggcgggcctcatgacggcgaacagcgccgccgaagagggcaagaacgtcgtcatcgtgtcggcctccaccaagccgacgtcgcgcggcggttcgaacaacgccgtgttctgcaaggcgttcgaggagcaggggtatccgcgcgttcccgtctcgcagtaccaaaaggagatattctgccagatgcacaaggtcgaccagcgcaagtggtaccagcactacaacaactccgagacggccatgaactggacgatcgaccttatggaaaaggccggctactcgatcgatatcgaaatcgggacgcccgatgaggaggatagcctctacctgcagcgcacggccgccgtgggctggaatctcaacggccaggagcctcctgaggagaacatggaagtcgttacaggcaagatgcagccgctcttggtctacgagcttgcccgccatctcaccgaagatctgggcggtgcgatctattacaagaacgttgccgagcagcttgttcgcgaaggtgacaacacgggacgcgtaaccgcggtcatctgcaagcgagaagacggcacctatgcgaagtacgtcggcaagaacgccatcgtactggcaacgggcgacttctcgggagatcgcgatatgatgcgttgcttctgccccgagaccgctgatttcgtcgacccgaaggtctacgacagcgaaccggattacgatcagggcttcaagtacggcggcatctacaaaggccagggccagaagatggggctgtgggtcggcgccgcatggcagaagagcttcccgaattgcacgatgggatcgtattgggctcccggtccgcgcaacctctacaccaaccatctcggacttctgctcgaccgtgatggtcagcgctacatgaacgaggactgcataggtcctatggcggctgaaaacatcatgctgcttcccgagaagaaagcgtacgcgatctgggatgcgggctatgcgaagcacgaggccgtttcgggcgactggacggttgactcgatgatgaccggcgaagaggccattgcggctgcggttgcgggctggaccaaaaccgctgagggcaacgggcagacctacgttatgggcgacacgatcgaggaggttatcgagaaactcggccttccgaaagaaacgatcgagacggtcaaccgctacaacgagcttgcggaaaagggcgtggacgaggacttccataaggatccgcagcatctgcataagatcgaagaaggcccgttcttcggcgagatgtgcgagacgttcggctttttgacggtgctcggcgggttgaacaccaacgtgcacatgcaggtgtgcgacgccgatgacaagccgcttcccggcctgtacaacgtgggcacgatggtgggcgacatgttctcgggaacctacacgttcatgatcgagggcgcgaactacggtatgacttgcatcaccttcggttatttgaccggcaagtacatcgccgaaaacgaataagctctattttcggcagcaaacgggcggaacttcgcccgaaagctccggcgccttcgggcgtcggagcttttctccgtctcggggcgatatgcgggatcggggcggcaaggtgcaccgtctctttttgctctgggctgggtgcgctcaaacagacgttttcgggtcgacgccgatgtgcgtgcctttctccgtcaggaatcgagcgttgccgcccgctcgtgcgtcatcacgatgagctcttgcttggagtgcacgatgaacttttgatagatcctgccggtgtgcgttttgatggtttcttctgcaagacacagttcgttgccgatcgctttgcggctgtaccctttgacgagaagcgaatacacctccgtctcgcgagccgagaggccatgctcgcttgccagcagttggatcgcaagcgattcgttggctcccgaatccgttttgtggtcggagccggggcttaccgccccccatccgcgtttgaggttctggctgctggtcatgtagagggcggcgagcacgagcacgaaagcgacgacgacggcaagcaccgtctggtcgggggagagggcttcgagaacggttccgagcagctggccgagaagaaggcaggcggtgctcgtcccaacgatccagataggcggctgatcgagcccctttgcgagatatgcgcacagcgagcagctgatgagatattgaaagcagtaccctacatcaagcaccgcagcgcctagctctatcgtgctcggcacgatgccgagcagaaaaaatcccatcgccataagcgggaagccgattcggtagaacagcaggtcaaaatcacttttaagcatgatcgagcagaagaacacaagcccgatggccgcgaggaatccgaacgatacgagcagtgcggaattctcgaaggagttgacgagcaggctgtgcatgacgccaagcgcaaaaccttggaatgccgaggttacgaggaatttcgtcggcaacttcaccttcgttttcaacccgtggctgtaaaccattttacgtgggacggcgtcgaagctcttcataaggcagtacaccatgggggcgggtacagccacgatggcgatctttcctattcccatcggcagaagcgagaagagatatgcgcctgccgttccgatgagcagtgcgaacaccagatgaaaaagcgcctgtttggggcctatgtgtccgagaatgcggctcgcctcgaggttgatgttggcggtgccgcatccgatgagcacggagccgaacaggtaaacgatgaccgcgatgtcgtggtgggtttcggtgaaggcggggtagcaggtgaacagaagcgctcccagcgataggccgatgccgagcgcaaagggaaaccagcgctttatgctcatcgagttgatgcgcttgtacaagatgctccaggtgagataggtcgccacgcttgcaacgagcagcatagtgcctttgggaagcgggaagccgacaagaggagaagcctcaagaaacagatacgggctttggaacagaagcgtcgtctgcatccaatacaagccgaaggcgatgctcaggtaggggtttttggcaacgctgcgcttaacgctctcgagcaagcgctgccgttcctctgcctgattgatgaccgcaggcgtgcgtttccccatcggcatatcctcccgtgcccttgcaccgatatgcaagtataccgcttattcaacgcctcgtctcgaagcccgtccctttcgctccaagtgccgttcgggctgtttgcgcatctgcgttacccccttgtttctttcgcaacggaaccgttggatctccgttgccgcccgtacgcctaccgatctgccgtaagccatacaatcgaactaacaaaaacacagcgccgttcccatcggcgacatcgcctcatcggggctgaagaaaggagcaggatcatgagcgaaacaggattgaccgatgccgagaagatgctcgacatggacgatgatgtagagcgcaagcgtgcagccgaagagcttgagcgcatggaggaaagcattaaattcgaggctgaggcctccgttgaagaagcagacgaagcgggagacgaaaccgcttccgtcgaggcggctgaaaccgcggcaaaagccgaggagcttaaggaagcgaccgagcaggaattcggcgactaaacatcgcttgacgatacaggaacccaccatttgaccagaggaggccatcatggctgaagtgaatacgatgatgaacgatgtggaagacaaggctcacgatatgaagaacgcggcgaaagacgctgcaaccgatgcgaagaacgtcgccaaggataccgctcatgacgtgcgcaacggcgtgaaggatgcggcaaccgacgcgaagaccgaagcacccgatgccatggacaaggtgaaggagagtgcgagcgaggcggctgaaaacgtcaagcatgcagcggaatctgcagccgagacggtcaagggcgccgcacaggatgcaggcgaggccgtccaagatgccttcgagaagatcaaggcgaagttctaaacctacaatcgattaagcacacgagagcgcggtgtcacccccgtagacgccgcgccctcttcgtttttccccggttgtggcatactgcttgcatgcagttcaacataagcatctacatacccggcgcgacgagcgtccatcgtcttgacgcgcgcgtcaagctcgtcttgctgctcgcgtactccatcacgctgtttttcatccatacgtgggcggggctgctcatctgcatcgcggcgtgtctcgccgcaacgattttggccagagtgcctttcgggcggatgttctcgctgcttgtgcccgtgtacgttattctggcgttcacgcttgcgttcaacagcttcgctctcgatgtgggccatgtggcgacaatctacgggatgggcgatgtgtcggccggggttcttacgggggcggcgccggtgcccttgttcggaacgttcgggttcgtgcccgagggctttgcgcgcggttgcttctacgcgctgcgcatcgtgtttctggtgcttgccagcttcatcgtatgcttcaccaccacctcgaacgatctgaccgatgcgctcaacgactttttaaagcccctgcgcgcctttcgcgttcccacgcaagatatcgccatgatggtttcgattgcgcttcggttcattcccgtgacggccgaggaattcgggcaggtgcgcgctgcgcagtgggcccgcggtgcagcgttttccgacggaagcgtgatcgagcgccttcgcgcttggcagaccgtgctcattccgttgttcgtcgggctgtttcgccgcgccgacaaccttgccatcgccatggaatcccgctgctacggcatgggcgatacacggaccgagctcaacccaagaagactctcgggctcttctgtcgcggtgctcggcatcgatcttgccgcctgcgttgcgctcggcgctctgctttaggctgcggcgaggttgggccgcggcgagggccaaaaacggccttacctatgtgcaagggcttgcggagcgaagggatggacatgcggatggcctatgcaattgcgagcaatcgtgcagaggcaatgtcgcagggccgtgtggcctgcggcggtttcgaatggcgcgagtcttgccgaatcgccgagcccctgcgccgctgccgtggaacttgtgagcgaaatagccgatcacgtgccgctttctgaaccgttttagtatgatggcatcgtttgctaggttgcggctttgcatttgcacggcaagccgcgctaacccatataccctgaggaggcagtgcacatgagcatcatcatcgatgtattcggccgcgaagtgcttgattcacgcggtaacccgacggtggaggtcgaggtcgtactcgaggacggctcgttcggtcgagcggcggttccttccggcgcatcgacgggcgcgttcgaagcagtcgagttgcgcgacggcgattcggagcgttatctcggcaaaggcaccctcaatgccgttgctcatgtcaacgaggagatcgccgatgccctcatcggcatggaggccgacgatcagcgtctcgtcgatgagaccatgatcgagatcgatggaaccgataacaagggcaacctgggagccaatgcgattctcggcgcatcgcttgcggtagcgaaggctgcatcggaggccgctgagctgcccctgtacaagtatgtcggcggcgtcaatgcgagcatgcttcccacgccgatgatgaacatcctgaatggcggtgttcatgccgataacaacgttgacttccaggagttcatgatcatgcccgttggcgctccctctttcgccgaggcgctgcgctggtgcgccgagatctaccacacgctcaagaaggtgctgcacgatgcaggacttggcggcggcgtgggcgacgaaggcggtttcgcacccaacttcaagaccaacgaagagccgctcgagtacatcgttcgcgcgtgcgaagccgcgggctacaagcccggtagcgacatcatgttcgcgatggaccccgcttccaccgagttctacaacgccgaaaccggcaaatacgtgcttgccggcgaaggccgcgagcttacgagtgccgagatggtggattactgggaggctctcgtcgacaagtatcccatcatctcgctcgaagacggcatggccgaagaggactgggacggctggaaggaactcaccgatcgcatcggcgagcgcgtgcagcttgtgggagacgacctgttcgtcacgaactccaagcgccttgccaagggtatcgaaatgggctgcgcaaacgcgattctcatcaaggtgaaccagatcggcagccttaccgagacgctcgaggccattcagatggcgaagcaggcgggctacgcgtgcgttatgagccaccgctcgggcgagaccgaagacacgaccatcgccgacttggccgttgcatgcaataccggccagatcaagacgggcgctccctgccgcagcgaccgcgttgccaagtacaaccagctcatccgcatcgaggaagagctcgatgctgccggaacctacgccggcatgggcgcgttctacaatatcaagcgctagattcggattttcgcatcgtttttgacgctcggttcatttgcttgagccgggcgtttttcgactttgggacgtgacggaaggcgttgttgatgcgggcgtcctcttggctgcggggcggcaaagggaggcgttgcgtctcgacacggcaagaggcgaggtttttgggggccgaaacaatcggtttgcgatttgcagcccctgccagtgcgttgtctacgcttcgaaatcgacgagatccttgagctcgacgccaaggccgttcgctatgcggatgagggtgctgagcctgggattgcccgttcctttttcgatctcgcggagtcgcgttcgattcattccgagcatagtggcaaactgctgctgggaaagccccgcggcttttcgcaggcgcactatctcctcacccatttttctttttgcagttagttcatccatcgggtaagcatatgacgtatactggtattgcatgagccgtataagagtcatttacaagtaaattgggcaccgaaagggcgcaaccgctatcctccgaaaagcgcgatgcggatgcaaagcgcatcgtcgcttcgatggtgaggtgcgttagagagggaatgaggcgcgttagggatcgtgagccagggggtggtgtgtggagattcatcagcttcgtcatgtgctggcagcagcggagaattccagttacgctcaggcagcaaagcggtgttttaccagccaacagaacatagcccattccgtaaaagccgttgagaccgagctcggggtgtcactgtttcggcgtaaagggaacgaaatggtgcttacggcgacaggcgaacgctttgccgttgaggcgcatgacataatcgcaaaggtcgacggtctgcatgttatgttcgcaaagcccggtgcttcagatgaggttttgaatcttgcggtaagcactaatttgtttgcaggaatacctttgggtactgacgagtacatagcgcaacatgccgatcggctgcgcatgtccgagatggattgcgaagagtgctatagggccatatgcacaggacgagccgatgttgccgtcatcatgtgcatggagcgaaggtttcgggattgcgactctttggagattgcggagtcgtcggcgtttgccttgatgtgcgactcgtccccgctgagtcggaaaaccagcttgtcggttgtggatatgaaggatcagaagctcctgcttatgtctgagccgccgtttcaatacgaaccgctgttcgtccaactggactcacttggctttgatcgggctaacgcgagtgttgttcccagtacaagttcgatgattcatctggtgaaacgacggggttccgtgggcttcgtgtccgataagttctctgcggcgccccctgcgggctttcgggcgattcccctgtcggactcccggttgaactggcgtttctacctgttgtttcgaaagagctcggctagcttcaaagcggttgcaaggtttgcgcaggatatccagggtacgttttcgggtagcggggaatcggcaaggcggaaacgggatgggaaagggaatctcgcctagcgtgatacagggcgagattcccgagcagcttgattatccgttggtttttcctttaggtgaatcggagatgccgggggttttcggtatgccgggcacgtgggcggcggcggatgcgcccggcatacccggtgcttgcggggctctcggggtacctggggccgccggcatgccgggtgcagcgggtgtgcccggtcgtcccgagccgtcttcgccgggctccgtggtaagggttggcggtctgaaacacatgatggcgtcctttctagaaagaaggcggcgcatgcgagccgatcgcgatggcttgcatgcgcacggttctattggttggtctctgacacttcgtcgattgcgcctttgaaatcaccttttatgaggattgatgtggcgatgatagtgataactgccggtatgatcatgaccatgaacgtgaccgaaagcgacattgccacactagcgtgcgcagccgtcatcatgtccatgatggctccaagcaagatcggtcccaaagcgccgccgaatcgaccgaatgcctggcaccaagatacgccggttgcgcggatctgggcggggtagacttcgggcataagcggctgcagtcccgtttgtccgtagttgattccgaaaccgaagagcaccattacgagcgcgatcaagccgtagggcacattgccggtggtgacggcaatgtagaagacaatcgtggtcaccaccaccatcaccgcaccgaacgagaagccggcaatgatgtttttctttcgcccgagcctttctgcgccgattccggcgaggatgttcgcaataatggctgcgccgttgttgagggtggccaaaccgtaactgtaacctgcggtgaccatcattttcggaagccatgcgttcattcccatgacgataaacgttccgaggaaatagccgatccagataacaagcgtaccccgcaagtacttcttgctgaatagagcgcgcgggccgaccttatctggttttgcggggatgatgtattgatcgggagtgaagttcgacgtcatattggtgttgccgaatttcgacttctcgagcttgcccagcgtcttattcaggtcatcgaagcgtccttggctggcgaaccaatgaggcgtttcgggcattttaacgaacagcacgatcgaccagaggattggtacagcgccgatgaaatagccgaggcgccagtagtcgaaatcaacgctgccaacaaagggaaggctcacgcctgagctggcgattgcggctgattttgccgtctcccaagcaccttggccgccgtcggtcatggcagtattgatggcttgggcggtggccgcatcgcttaacgcgcctcccacgactccggcgaggagccatccgacgatcatgaaggccatgccgaaagtgatgaagaacgagcgattcttcgaaggtatccattccgagaagcaggtggtaaccatgggaatggtggcgccgaggcctatgcctgcggcaacacggaagaaagcaaaaaactcccagttcatcgagaaataaagcggaagattcaaaatgccgtagatcagagtcatgcttgcaagcgcctttttgcgcccaagcttgtctgcaatcggaccggcaacgagtcccccgagaaccaagccgatcaacgaccatgaggacaatgacccggttacggtggatgaaagcccccatgctgcttgcagcgatggaaccgtgtaggagactatcatgtagtcatagccttcgaaaatattgcacaggccaagtagaacgaaaatcccccaagagtatttagtcaacccgatggagtcgatgaatttggaaaccgtgaactttgtcttcggaccaaactcagcaaccatggcattgctcatctcaacctcctttagtgactcaagaatgtgaatcttgatccgatgaaggcgcacgcggatcgttgcccttcgcgtaatcgttatatgggtgctgccgtgcgtcgtttctcgtatccggttctgaaatgcccggcggcgcgacgtcgcggggttttgtgctcgcaaacgaattctcaacggttttgccgcaccttccgcagaacgagcaaaacgcaccacagctacccaattctgttcatctccctctttgggaaagcggagagggtcgggcaactccgctttctctggctgcgaatcgacatgcacccaagcctttacggaacgaggatcgcggctttcttgcctttggcggcaagcttctgggcgcaatcttctatcgtgccgatttcgagacacttggcttggcacgattgaacgcatgcgggcagtttgcctgctgcggtccgcttttcgcacagatcgcagagctcgcctgggattgcgatgtagtcccaatgccaagagccgtcggcgtgttgtcttggtttatcttcgagaactttgataccccagtcgtttatgccgcattcgagttcgttgcggcatgcgatttcgcagctatggcagcccgagcaaaactcatagtcgatatatagggctttttgcgtcattttcattacctccttctcgctttattgcggcttaggcctgtagggtttcatcggtgggtcgccatacctgctgatatgtaaattcggcttgccggctgggctccaagaagatgccggtgctgtcgggatcgttcggcccaccctcgttctcggctttctcaagagagcagatcatctgcttgaaggtgtttccgaagcccatgacgccgtttacgctgttgggcatgagcacgttgatgttcgatttccagttgccgaaaaggtttggttcttcgccatcctgttcgggataccaccagccatgcattgtgtggcaaacgccttcttttatcgtcggaacgatgtgggctcgttggcgtaccgttccgtagggtgaggaaatcttcacccagtcatcttcctcgatgccgagtttcgcggcatcggtggggttgatgtcgatttggggatacggagtaatctgccgaaggcttggaacttgtttgtgctcggaatggaagaactcttggcggcgagcccccgtggtgagtatgaacggatatttttccatgagatcgggcgtgcgttccggtccataagcaggatcttcgtagtaaggcagcgggttttcaccgaattgttcgtacatgtaggagtagagctcgacgcggccggtgctagttgggaagcccacttgtccgtcgggtcgcagcttgccgacctcgtacttgtagtacggttcgttcgacatgaccgtgactttttcgcgcagctcttcgtagggaagccacgagcgcatcacatggaaattgtcataatcggtctgggttttgaatcggttccagaattccgggtacatcttttttccgacggccatcatgacttctacgtcggacttgcattcgccaacctggacgcacttgttttgggcaccgtagaatgacgagttcaagccgtaatgggttaccaccatgccgtcgtgctcgatggttgaggcgatgggcaggaacacgtcgcagcacgccattgtcgttggattcatgagcaggtctgctgcgcagcagaaatcaagtttcttcagagcttcgtaccagcgttgcggttctgccgagatggctgtgccgatcggatttgacgagataaaatgagccatatggatcttatagggtttctcggtttccaaggctttcaggaattcgtcgggcatgaccgtccacaggatagatcccatggctggatatttgtcgattccgatgcgcttcgcccacgtctcctccgtcatgatatggtttttaaacgcgagctcgagcgtggagtcggttgcgtcgtctaccttctcgtcggccgaaatcgagccaccgtcacgtacgacattgccttggtcgtcgcccatgccaagcgttgttccgccgggagcatcgatgaagcctgtgatagtcatgagcgcgatgaggcattggccgagttgggtgccattcgggttttcgtctacggcgagaccccaagcgacgctgctgggtttggcattgccgaacaagcgagcggctcgccaaatctgatcttcgggtacgtcgcatatttcggcagcctttgcgggcggcatgtcctgtacgcgctcgacaagctgttcgtatccatagcaccatttgtcgataaaatcatgatcgacaagatcgtcatgcgccaatacgtagatgaatgccatcgcgagcgccgtgtcggttccgggccgtagctgcagtacctcctcggaacgtgttccaagccaggtcatgcgaggatcgacgcagatgagctttgttccgaaatgacgtaccatctcgatgaccgcatggccgtagaggccatcgggattgctgcggagcggttcttttccccaaataagaatgcattcgggggcgacccagccctcatgttcatatcggtcttcgaacttttgagcgtagtctatctcggggtatccgccgccgatcatgaaagccgtgttggtcatgcggggcccgtagcacgaccaaccagcttgcgcgtagacggaattaggggtgccgaacacgaggttcgcccactgaggataccagttgttgccttcacgacccgtgccgccgaacacgcaaatcgcttctgctccgtacttctcggtaatttcacgggcgttttgcgcaatgatatcggtcgcctcgtcccatgtgcattgctgccacttgtctttaccgcgatcttcttttgcgcgcttcagcggatggatgatacgatctgggtgatagatgtactcgggcaatgccaggcaccgtgtgcacagagaccctttggtaatcggatgctcgggatcgccttcgaccttgacgactttgccgtccttgacatgcacttgcagtccgcatccgaccggatggcatcccggaggcgaccatgcgcacgttctgaagatggtctcttctccctcttgtctcttccattctgtcatatgccttctcctctcgctcgttgggaaacgatggctcgcacgaaagatcgaccccctttgtgcgccttcattgtccgagcgaaagagaagaacgagtagccgtctaaaatgttcaggatgacaaaagaaatttgacagcagcggcctctatatgggaggcgaggccgcatcaaaagaccagcggcggctcatcggccttgttatcatatgaaattatagataggatttcatatgaatatatatacatcaagcgaacttgcttcaaaaaacgaaggcgatatgcgatgcggcccggaagcaagggtgcgcgtatatcagcacgaacggaaaaatcgatctcatgatgatcgacctttccgatttcgataccctcaacgatgcggtctattcgcatgatgagtggatggccatgaggaccttgcatgccctatgggataagacggaaggccgcccgatctcaagggaggacatcgagcgagagatctcctcgcatcgatcagagcaagcacagggctaggctcgaaacatgacatacattatcttggataccaacgtcctcgtttcggtgctgtggcagcatctcgattacggcaatccggcccgtttggttcggctttgcatcgaaagacggttcggtctggtgtattcagccgctatgtatcgcgaatacgaggcggcgcttgcgcgccctaagtttgccttcgatcgagccgaggtcgatgcaattcttgggactgtaagaacgtttggatgctgcgccgatcccgttgtgcgcggatacgcattcccgctctgccgcgatcctgatgatcagaagttctacgatgccgcgcaatgttgggacgccattctcgtcacgggaaacaccaagcatttccctgacgatcagcgcgcgtgcacaccagctgattttctcgcgaatcgccaactctgagcatggtgcaaaccttttgatgaaacttattcttctagcgctataatggacgacgtgcattgaatcgcgcgaagccaaagggggccgccgcagacggctggaattcgcatcgcgctcattaagaggggagagatacctgtgccggaaatgatctcgcttgaagaagcccgttcgcttgtgctgtcgcatgttgagccgcttcccactgaaaccgttcctctgctcgatgtcgtcggacgagtgagcgcctatgcgctgacgagcgacatcgacatatcgccattcgcgcattccgccatggacggctatgctctgtatgccgccgatatcgagcaggcgaacgaacagaatccggttcagctcaaggtcatcgcagaagtagcagctggcgattggtatgacggtccggtcgagcatggcgaatgcgtgcgcatcatgacgggcgcccccattcccgaagtgctcgatgcggttgtgaaatacgagatcgtcgaacccgtagagggcgacggcaagccgggcagcaccgtgtcgttctcggctcctgccaaagtcggctcgaacatccgcgaggcaggcgaagaggcgaaggccggcgaggccattgtcgaagccggcgaagttatcagctgcgcgggcatcggttttcttgcgggttgcggaatcgtggaggttgccacctacgagcgcccgcgcgttgccatcatctccatcggatcggagctcgtcgatcccactgaggttcccacgggaggcaagatccgcaactcgaacagcttcgcccttgccgcaagcgtgcaggcggcgggtggcattcccgatatccttccgatcgtcgaagatagcgaagatgcgctcgccgatgcggtgaagagcgcttgcgctacgcatgatttcgttatcacgagcggcggcgcttcgaacggagatttcgatttcatcaagccggtggtcgagcgcttgggcgaacttctcatgacaaccgttaacatgcggccgggcaaagcgcagaccttcggcatcgtcgacggcaagccggtgttcgggctgccgggcaatccggcggcggcgtacgtcgggttcgagatgataatccgccctgctttgcgcaagatgcagggctatcgctatttcgagcgcccgcgcatcaaagcgcggctttcccgcgatgttaagaaaaacgatccgcgccgcatattcttgcgttcgacgctgtataaaaacgacgaaggcgagtacatcgtggcgcctgcgagaaaccaaagctcagggctgttcggagtcatccagcgcagcaactgcatggccattatgcccgaggggctggaatcccgcacggccggatcggtcgtcgagtgcgtgctgctcgatgtggccgaagagctgagcctttaagaagccctccatgctgcggtgcctgacggctggctgctatgccgccgggcaccgtggcttacgaaccgattcgtgcaaagccgatgagaaggagttcgaccatgccagataagtccgtccgcttcgcgatcgtaacctgctccgacacgcgcgatctgagccaagacacggcaggagcggcgcttgaagagcgcattgccgagcaaggctgggagtgcgcgagccacgttgtcgtgaaggacgagcgggccgatatagccgccgccatcgtggaggcgaccgacaacctggaggtcgatgtcgttctcacttgcggaggcagcggcctttcgttgcgcgatgtgacgcccgaagccactcaagacgtgtgcgaccgaaacgtacccggcatagcggaagccatgcgagcccacagcattgcaatcacgccgcacgctatgctttcgcgagcgctctgcatgcagcgggggcgcgcactcgtcatcaatctgcccggtagcaagaaagccgcatgcgagaattgggagggagttcttcccgcactcggccatgcggtatcgatgatggcgggggaaggccactgagctttctgcgaaagcgccaaggcgccctttgcgggcgccttgaacatttggctgggttctcgttatatttgccgtgcggcagcattgcctgcgcagatggcttcgccaatgttaaacggcttatcgcaatcgcccacggtgtatacctccatggatagcccttgggcgagatcggtgttcggaagaccgtccaacgcttcgataaccgtgccgcatgccagctcgacttcgacaccggaatcggaagtgacggtaacggtgccatctccgatgctggagacggtcgcttcgggccagaagcgggtgccaagggccttgatgatgggctgcgtgtacgtcttgatccagtaagagtgccctgcgccgatttcgctcgctgcgctgggggtcacgacttgaacgtgcttgccttgggcaatcaggtacatgacgacgtcgatggcttgggcgtttgaacctaccaccacgacgttgtcggcaatttcggaggtcatgaaatcatcgatggagacaacgtttgtgccactggtctccgaaagtccgagcgtgtcgcgcttgctgcctacagcgataaccactgcgtcgggattctgcttgttgataaagtcggcatcggcttcttggttggtgatgacctctaccccggaaacctcgagttgtttttcgaggtaggtcttgaagggagccaggttctcgtgcgggccctttacgttgctggcgaatggcagaaggccgccaagagaactcttccgttcgcagagcgttacatgatgtccccgttcggctgccacccgtgctgcttccatgccggccggacccgctcccactacaagtacgttcttggcggtttcggcaggctccggctgatagcttcccgtgagctggccggaggcaaacctgaagggatgtgcggcgtttgtacggcagctgaatgtgagactgccatctccgctggcgtcccagtggcagtgcatgcagcgcgtgcaagggcgaatttcatcgaggcgcccttcttgcagtttgatgaggtactcggggtctacgctcaaggggcggttcatgaggatgaagtcaagctcgttttcggcgacaagcttttcgaaaaactcggggtcacgtgcaggatccatgtaagtaacggcaccaacgggaatggaaacggccttctttatttcggctgccgcttttgtcatgattcccaagccggagcggtcgctcttgagcatcccctgccaatggcgctcgaaatcgaactgggtgccgtaacctgtggtcccctcgatgccgaagccggcaaaatacagatcgcctgcaaattccgcaacgtgcataccgcaaggcccgatacgaacatggagagagtcggcacctgcttcttcgatgagtttgcacatcgctttgttctcttctaccgtggtaaagagggcgttgtctccgacgttcttgtcgttttcctcaacgccgttgatgagaacctgcactgggtaatctgcgccgcatgtatcttttattcctttgacgacttcgcatgcgaatctggtgcggttttcgaaggtctgcggcccgtattcgtcgtctcgtttgttgcggttgcgcgacatgaaggtttggccgatgttctcgcctgcggcgttgatttcaacgcaatcgaaaccgcaatttttgagcacgcctgccgccttgattgtgtccgcgatgaggtcttggatttcctgggcggtcatatccatgcaatccgatgactgaaacaaggcgtttgggtcttcctcgaagccgctgaagacgagacccatcgtggcaagctgataaccggcgaggcttccgttgtcgtgaatgttctgcgtgaaggctttcaagtcgtcttctgtccagtcgacaaacttgcccacgtcgggaatggctttgaaatggtcgtacagctcggcgaaatcatcgcagtagacaatccccgcgccacctttggcaagcgaggcgtaatgttgcagatgcaggtcgccgaggattccctgggaagtgacgccgatatatccagcggctgatttaacgatgcgattgggaagttcgagcgagcccatggaccatccggtgaaaagcgaggggcacgtgccgttggcgacttcgggttgatcggtctgggggttgaggtttgcggcgtgagtgcgcgtatcggtgctgctggcggctcccacggcgccatcctccgctacggtctggggctcctttggagcgcatcctgcaatgccaaacgaggcaaacgcgcctgcagtcaatgcggagccagccagaaaagaacgtcttgatatgcttcccataataagatcctcctcattcctctttgtgtctttgcccccttggggctcaacaagagtaagatttcggacaggggaggcgtgtctcaaaatgggtgattcgacggtaacctaggtgattttacgtcaggttgatgctttcgcagtagcttatgagctcttgtctcgtgtggacgtcggttgcgcggtagatgcgcttcacatgggatcgcactgtattctgcgatatgacgagttcttccgcaatggcgggaacgtttttgccacgcaagagcatttcgaggatttccgcctctctgccactgagttgatgccggtcttggacgatatgcgaaacggtttgcgaatcgattgtctgtcccgaagcgcttttccccgaaaggggcttcgcaagcgaagacggctcatcgtcgcttgattgggccggcgattcgatatgagctgactctcgtttgcgccgccgtgcgaacatgaatgccatgctgagtatgtagatgcagaaaaacacgccgaacaccaagagcagttcggtcgagtttgatgcctgaaggatcatcggcataacctgctcgagaatcacgcaaacaaccatcaaaacgaaaagtcccgtggcgtagaaaaattcgaaaaccagattgcctttacgggcaatcgttatggagtcaacccagaacaatgcgttgaccacgacgaaatgcagacacgagcccgcgaatagcatgatgagagagtacgcgtgtccggcaaacggaacggggaaaagggcgatgatcagcacgggggttacgtacttgaagaactggaccgagcgtagcggggcgttgatcagcttcaaggcgagaaatacaacgatggcggctgttgcttgcgcagcgcagacgaccgccagttgagtgcccgggtctatcgtgttcatgagccccatgtagttcatggcgggggcgatgatttgcaatgcgataacgcagaagacgacttcggcgaaacgggaaaaggccggtacgtatttctctcttacgtttgttatgcgatgctgcgaaggggcgtcgtcttttctgcttccagcgagaagcagaatgctgcaggccgcagatgcaaggagcgagcagccaagatacgcatgcagttggttctggggggcgatggcgtaccaggcgtttatgattgccgagcagagcagtatgagcggcagggtaatacgggttcgggacgatgcggaatgcagttgcaccacccaaaacaccgataggcaagcgaacgcccatccagtgcaaaaggcggtgatgcagatggcgggaacgctgctggtccaaaagccgcttaagagcgatgctgctgcggcggcgacggcccagaaggttgtttgcgcatgaaaccgaccgttggatccggtcagcatggaaatggcggctcggagaaatatgcccgccagcaagccgattgtcgcgaaccatatataccaatcaataagttcgtgaccagcggagccgaacaggccgccgttcgtcagcgttgtgctcccgttccatacgccaatgccgtagaggcttagattgatgcctgagcctatggcgataagcaatgaactctttctggctgtcacggcgtccctccctttcgtgcacattataccgaagctcgaaacatgcgaaaggagaacggattgcgggcgagtgcgtcaaatcggttctgcaaggcgagaattcttcatgcagtcggatcggacgctgctgcaccgttgtcgacccgtgcgctatactagggacgagctaagagaaaggctttttcgtgagcgagcaccgtagcgattattcgagcatgtattcccagagaagcgtcaagcagcccatcgattttgcgcgcgacgtcatatcggcgtcggggaagctcgctttcgatccggaaaagctcgcgactattcccgcacgcgatcgccgatgggcgtgggtcgaggtcgaccttgcagccatcaggcacaacgtcggcgttgcccgccaatgcatcgggcggggtcgacggctgatggccgtggtgaaggccgatgcgtacgggcacggtgcggtgaaggtggcgaaaaccgcgctcaattcgggtgccgaatacctcggcgttgcgacggttgatgaagccatcgagctgcgcgaggcgcttatcaacgctcccgtcctcgtgttggccgagccgccgcttgcctccattcccctcctgcttgcctacaaaatcatgccgactgtttatacgcccgagttcgccatacagtacggcgaggcggcggatgcgttcggggtgagggctccgtaccatttgaagataaacaccgggatgaaccgcatcggcatacgccacgacgaggtcgtggagttcatgacgcaggtcagcttccaccgcgcgctcgatctggtcggcacgttcacgcattttgcaacagccgattgccccgaaacgctcgatttccagattcagacgaagcgcttcatcgaagcgatcaacgccatgcgcgcagcgggcatcaatcccggcatcgtgcatgcggccaactcggcggccatcatccgctaccctgatgttcacttcgacatggcgcgcctgggcatctcgctctacgggttttatccgtgtcaggaaacgcgccgtatggttgatcttcatcccgccatgagcgttcatgcacgcatcaccgaggtcaaactggtgcccatgagcgagggcgtgagctacgggatgcagtaccgaagccccggcagcgtgaagatatgcacgttgccgcttggctacgccgacgggtatcgccgcgagctttcaggcagaatcgatgtgatccttgatgggcaacggtgtcgccaggtcggtaacatctgcatggaccagtgtatgttcgaggtggatatgcgcgtatacgggaaccgacgcaggctcgatccgcagataggcgacgaggtcgtcgtcgtcgggcggcagggcgattcgatcgtgacggtcgacgatatggcgaacatgctcggcacggtgccgcacgagatcgtcatcggcttctcgcatcggatgccgcgaatatacgtatgagcggctcggtgagcatgcgccgcatcgaggagcatcggcgtgtggcgggtgcgggaaaggctcccgaaggcgtttcgggcggcgatgcgcgcatcgagggtaaaacgacgatggaacggacagctatgaagaaaccgcatattcctttggatcagatcagggccgaagttgaagcgtgcaggaaatgtgcgttatgcgagggccgcacgcaaatcgtattcggggtggggaatccgcaggctcgcgtcatgatcgtcggtgaggctccagggaaaaacgaagatctccagggcgagccgttcgtgggcgcggcgggccagtacctcaacgagctccttgcttttgcgggcctcaagcgcgaggatatctacatcgcaaacgtgctcaagtgccgcccgccgggaaatcgcgatccgcagcccgaggagatccagctgtgcacgccgtacctgcgcgagcaaacgcgcacgatcgatccggaattcatcgtgacgctcggcaatttctcaaccaagttcattctcaagaccgatgtgggcatcacgcggctgcacggcaagcttcagcgggcggggaagttcaaggtgtttccgatcttccatccggcggcggcgatttacgatcgaagcaagcgcgatgtcatggaaacggatttccgcacgctcggcgcactgctggccgaaacgcccgatccgaaatcgatcgagccggctaagcgcgagcccgaagccgagcagctggcgtttggcggcgaggaggcctaggtgcgggccttgtcctcgggcgtgagcggcatggggctcagagccatttcttctttctgaaaaagcgcagctcgacaattacgagcacgacgcagatggcgatgatggcggggtaggcgaacggcgaggcgagctcgggcatgttttggaagttcatgccgtaccagctggtgataagagtgagcggcacgaagatggtcgtgatgaccgtgaaccatcgcatgatttcgttttgttgggtgtctatttgcatctgaaaaagctcgcgcagctgaaggctgtagtctttgagcgattgggcgcgctgcataagccggtcggtctgctgggagaacaggtggaacagccgccgctcctccttggtgagcaggtgatgctcgtcgtcgctcatgatgctgctcatatccgaaagctgttggtagtagctatcgaggcgcagtatcttccttctgatttgcagcatgtggtggttcgtcacgtgccgttttcggttgaggatgctctcttcggtatcgccgagcctttcttcgacgtcggctaaaaacaaggtgtcgtccttcacggcgaacttcaaaaactcgtaaagcacgcgggcgatcgtcggattctgcgctctgcgggctttcgctatctcgttgagaatcgattcgcaaagatctccgtcgtcgacgaagataaggcgcgttgcatcgagatagaagccgaagcacgaagggtcttcgagcagctgcgctttgttcggtatggaaagagagccgatcatgcagtcggggaacacatcgacgtaggagctttgagacgcagcaaggctgcgaagcgattcgagcgcatccgcgtcaccgatgccgatggagccgagctcttcggttcgcagcacttcaacaatgagctccgaggggtcggtcttttgctgggggtcgatggcttcgaggcgatcggtgatccgatagagtgctggcatggcgggttctccttcgggcttctgcgggcgttcgcgttcggcgacgcggttcgttgctgtacggcccgcaattccattgattatacgaaaggccgaacgatgtggagtgcgttgcgccgttcggtcatcgattcgttgaacgggtgcggcgtccaacttctcgttgaaacggagactgaacaagagacacgcccagggggcgacgctagaatacacgactcggatataaatgcgggttgaaacgatcgtcgctttgacctgctgcaaaaatgggaggaaccgaacgtatggcagaggggaacaagacggcagcgggcgaaaaaaatcagttggagaagaggtaccgattgcgcgatatggagccgtggcaaaagcagcggcttttcggcagcattacggcggtcgttttgatattcggcattttccttatcgcgacctgttgccagctgtaccaggataaggttgcggaagatgcatactggaatcagtatctgcaggaggtttcaccagagctgcaggaaaaggtcgaagagttttcgggcgatgcgacgcacgtggagaccgccgtttaccttgagcaggtgcgtgcggttgacataaagaactcgcagttcgaggttgtcttgcaggtgggataccgctgggaaggcgatcctgagctcgatttctccaccaatgagaccgttcatttctacaagggaaagataaacgggcttacccttttggatgaatatcacgagggaagtacgaactatcaacttatttgctacgatgtggtgatcaacaagcagttctggacgcctcgtttcccgcttgaatcgcaccagttgcgcatttacttggagccttccgaaaacgtgaacagcatcgtgctcgttgccgccgccgacgagagctatacgaacccgaatctcggaataacggggtatcagctgacgcgcttcgatgtggcgcaggcggtcatcgcttacgatgacccgttgctcaatcccgccttcgatgaatacggtgacaacagttcggtctacaagaccgaggttatggcgcagcttgaaatcaaccgcgaaggcatcggccttttcatcaagtgcttcatcgccctttacggcacgacggcgtggatactgctctgcctctatatatgcacgttcaggcgggtcgatccgctcggcatgatcggtgcggcgttcttcggctcggtctcgaacatcatggtgggcgcgaacctggttcccgatgcgttgcagatgggcttgctcgagtacggaaacctgttcggcgtgggaatcatcattgcgggaacatcggttgtcatcagcatcaacgcgattcgcaaagagcatggaaacgaagcgttcgcccagttctacggacgcgtcatgcttgctctgttcgtcgttctcgtcgtggtgggcaatctggcgctgccgttgtcgtcgatgctgtagccgattgcgtcgcatcgccggtatctgcaaggaagggcgctcctcaacggggcgcccttccttcgttgcttgcagacgcgctcggcaagcggcctcagcgtgctgctttgctctggcgggtatccgaatcagggggaatgacctgagctatcgtctgttcggtcgcggcggtcgacgtgctgttgttgtgcgctgccgccagattgcagaaagcggggaatgcgggagattttcttcccaaggggcctatgatgcacatgggaacggagagtccctcgtcgggatgaaacgatacgggtttggtttgcatgatgtcgacgtcgagcgccgcgatgcgcgggacaatgacggcgccgcccgttgcgtacattttgatgaggctgcgaatggagcgatcggtttcccgaggatcgatcggcgctcccttggcggcaagcatctgcttgacatggtcgttgaagaaatcgtaatgaggccacagggcaacgctggttccctcgagctcggcaaggcgtatgtagggctgctgcgagagggggttgcgcttggatatctggaccccgcagggaagcttcccgacgggtatgcaatcgtagccggcaacgtcggctttgccgatggtgatgaccgcgtctgcatcgccgctgtcgagggccgcaaggcattcgcttttggagccaaagtggatctcggtttcgattccgaggttggtgctgatgaacttggcaacgttgacgctgaccttttctttggagccgaaggcgggaatgcatatgtagacgctgaaaaccgatgcgcctgccgttttgttcctgtggttgcgcgcaaacgattcaaggtcttcgtagcagcccatgaccagttgcgcacgctcgtagaactcgtatccgaaatccgttggaacgacgccgcggttcttcctcacgagcagctgcgcgccgatttcgctttccagatcggcgatcgatttcgacatgccctgggccgtgatgaactgttcggcggcggctgaggagaagctgccgcattcgacaaccgatacgaagtatttgatctggttaatgttcacagcgattcctctggagacgggtgcatgtttgcctctgaagaagcttttcgcaaaaggcagcatcgttcattatgggtacccttatgcgggtgtcaacaaagtgcaacgagaagttgaggcatggcgattataccagataaataagaacttacttacttgcggggagcgacggaaacgcgagggaagcttcaaggcgtgcgggcatcggcgctactgggagaggatctcggaggccttcgactccgagatgaaccgctgcgcagccatgaagaagcgcttgagtgcctgcactttcgacgattggtttttcggattgccaagaaggcacagcggtgcggttatgccttcgttcggatcgaagggaacggcgatcgagtgtgcaacctcgtcttcgatggcgctgatgtaagggagaaacagcgctcctccgcgttcgagcagatttgtcatgtcttcgaggtcggcttcaagggggatggggtcgatcatggcccctttctcagcaaggcgtttctttatggattcgttgaagaactcgttgccgggccagaaggcgacatgcgctccttcgagatcggcgagccggatgctcttcttccgcgaaagcggattgtccaaagatacctgagccccgcaggggatggttccgatggggtcgcagtcgatgttttcgatagatgctttgccgatggtgattacgagatcggccgctccgtccgatagggccgtcaagcagtaatcaggcggtccgaacgaaatggacgcgttgatgcccaggttcttgcgaatgaacgccgctacgctcgtgctcactttgcccatgccgatgaagctgggggcgcagatcagcaaaacgagggagggcgctccgtcggccggcagcacgtagtcgcgggcgaacccttccagattgtcgaagcagcgctcggcaagttttgcctgttcgtagaacttggcgccgaactcggtgggctcgacgcctcggtttttccggacgagcagctgcagcccgatttcgtgctcgagatcggcgatggctttcgacatgccttgggccgtgatgtaatgatctgcggcggctgcggaaaaactgccgcgttcgaccgcagaaataaagtatcttacctggttgatgttcaaaacgatccctgcgcgtctgccgttgtgcggatgttggttacatatgcctacaaaatatgatttccatgataagaattggcgaaataccatgtcaacagacgcaacgagaagttggagcacgagacggatcgcgtgcatgatcggcgtgcgatgatactctgtggaaggtcttgtcgacatgagcccatgctctgctcgcgtaaatcgcccctgcggcggtgggcggcttttcgggtattcgcgctcgccgtcggccggccttttcattggatcgaaaggaaaaaatgatgtcaggttctcaaaaggcgttgaaggtcgtatccatcatcatgatcatctatgcgatcatcgtggttctgctcggagcgtttctctgcttcggggcatcgatccccggcgtagccggccaggctatcgacgtgaacggatcggctgtcgatgccgccgcgctttcggttaccatgggtgcgggtttcgttatttcaggagttttctacctgatcatcggcttcctcggtcatcgtggggcaaagaaccccgccaagatcggaccgtttttcgtcctatccgtcatcggggtcgttcttgcagtggttggctccgtgatggccgttatgcagggttcgttccccttgtcgcagctcatcggcctgttggttgtcatcctgtgtgcggttctggctttcagcatcaaaaaacagcggcaggcttaaggcgtctggcggccgattgtcgaacccagcgagcgcgaacggcttcgatgccgctcgcgctcgttctttttgcggattcgggtcgcgggccttcgatgcgggctggctgcgctttggcgcagatgcgcttgtccgggttctcgtgaagccgtatcgggtgctttcccttccgttcgcatcctgtaacgcggtgtttcggctcctttaaccgtttggaaacatatcccgcataagggaattgctataattacccgtcgatactaatgagtgaagcggcaccgtgctccgtacgcatcggtgctgtttttgcatctgagacgagaaggatgagatcgccgtgtatcccattattgaagttgaggcgctcaacgacgaagtgacccgcatggtcatcgaggcgcccgccattgcgaagaagatcaggcccggccagttcatcatgctccgcatcgacgaagagggcgagcgcattccgctcaccatgaacgattgcgatgcgcaggccggcacggtgacgataatctttcaggcggtgggcgccaccactgcgaaactcgcgaagatgaaggcgggagattcccttttggatttcgcggggccgctcggcaatcccactgagctcgatggcgccaagcgcgcctgcgtgatcggtggcggcctgggaaccgccatcgcgtttccccaggcgaaatggctgcatgaacacggcgtcgaggttgacgtgatcacaggctttcgcactgaagatctcataatcctcgaagatgagatcaacgagaattcgtctcggcagatcatcatgaccgacgacggttcgaacggcaacaagggcctcgtcacccaggcgctgcagcagcgcatcgacgagggcgccgattacgatctcgtgcttgcggtcggtccggtcatcatgatgaaattcgtggcggcaaccacgaagccttacggcatcaagacgcttgtgtccatgaaccctctcatgatcgatgggacgggcatgtgcggcggctgtcgcgtgaaggtgggagacgagtacctgcatgcgtgcgtcgacggtcccgatttcgacggccatcttgtcgactacgacgatgcgatgcgtcgcggcgtgcagtaccgatcgttcgagaatgccgcccgagaggcgaacgagggacgagattgcatgaacgggaagggggaatagccatggcagacgcaaagaaactgcaagtgaacaggcaaaaggaaaagacccctatgcccgagctcgatccgaccatccgttcgcaaacattcgacgaggtttcgcagggttattcggccgaggaggccgtcaacgaagcgcttcgctgcatccattgtccgaacaagccgtgcgtgagcggctgtccggtcggcgttcccatctccgatttcatccgcgaggtgggcgagggcaatttcggccgcgcctatgctgtcgtgaaggaaaccaacacgcttcccgccatctgcggtcgtgtatgcccgcaggaaaaccagtgcgagggcgtgtgcacccgtggcaagaacggagagcctgtgggcatcggccgtctcgagcggtttgtcgccgactgggcctttgctaatcccgaacaagccgcagccgccctcgaggaatatcgcagcggaagcgaatgcgcaacggggcacgatctttccggcaagcgcgttgcggttgtcggctcgggtcccgcatcgcttacctgtgcgggagagcttgcgaaatgccatgccgaagtaacggtgttcgaggcattgcatcgggtgggcggcgtgctcacctacggcattcccgagttccgccttccgaaggatcttgtggcgaaagaggtttcggcgatcgccgatctaggcgtgtcgttcgaagtgaacgcccttgtcggcaagctgtacgacatcgacgagctgatgggcgaaatgggtttcgatgccgtattcgtcggtacgggtgcggggcttccttcgtatctgggcatcgagggcgaggggcttaacggctctatggtcgcaagcgagttgctgacccgcgtcaaccttatgaaagcctacaagtttcccgaatacgccaccccggtgtacgcgggcaagaaatgcgttgtcgtcggtggcggcaacgttgcaatggatgcagcgcgcacagctcgccgccttggcgcggaggtgacgatcgtctaccgccgcgggaaagaggagatgcccgcccgtgccgaagaaatccatcatgcggagcaggagggcatcgcgtttcagatgctcaccaaccccgttcgtgtgctcggcaacgaagagggttgggtcagcggactggaatgcgtgaggatggagctcggcgaacccgatgcaagcggccgccggcgtccgatggagattgcgggcagcaatttcgtcatcgacatcgatatgctggtcatagcggttggttcgaaatcgaatcccctcatcgccgatacgacgcctggcctggaaaccacgccgcgccatctcatcgttgccgatgacgagacgtgcatgacttcgatccccggcgtgtttgcgggaggagatgccgtgatcggcgccgccaccgtgattcttgcgatgggtgcgggcaagcgcgctgcgaagggcattgcggagtatctgagcgcggtataatgggccccttggccgctcgcgcttgtgaggagcatcggtatgaaccgcatgttcgacgataatcgcattgaggacggagatcgctcctacgttgttgaggagggtgctggatttgtgcttctttcggcacctcatcaggtcgagcacggtcgcgagggcacgataaagcaggccgagcccgatacgggaaggcttgcacgatgcctcaacgagcgcataggatgccccatcatatatcggtgcggcagttcgcttgaggatccgaattacgatgaggcgagtgcgtatcgcgatcggatcgtgcgctttgtcgaggaaaagggaatcaaggtggtgctcgatctgcatgagatggccgcacgccatcagagcatggttgaaatcgggacgggccatggccgcaatatcgacgatagggacgacttgcttgccgtggttcgacgggcattcgaatcccacggcatcgagccggtcaccgtcgataccgtttttccggcagcgggcttttttcgggtttcttccgatgttgcgcgaaggtcgcctgcctgctgttttcagatagaaatgaacgtgcgcatgttcggctttgacgcttgtccgtctgcgtttgaggcggtatgcggctccttggaagaagcggtgattcggctaggcgaggtgatctgaatcgaaggttggttggtcgttaacgggttcttgcgatccgatcgcttcaaggcgacgtattcccatcttctggatgccgccgaggcgatgggcatcgggctttcggtgaagacgaacatcgaattggcgccgtttgattttgcggatgcgcgcgagcgcgcgttgctgcccgatttcgttttgttttgggataaagacatctgcttggcgcggctgctcgaagcgcagcgattgcctgtgttcaaccgcgccgatgccattgaaatatgcgatagcaaagcgctcacctacctggcgcttgccgaaagcggaatcgaaatgcccgatacgatcatcgtgccgatggcttttcagccgccttcgtgggacggcgagtcctttcccgatcgggcgatcgagcggcttgggctgccccttgttgcaaaggagagcagcgggtcgttcggagagcaggtccaccttgcctcctcgcgcgacgaactcgtagcggtgctcggatcgttcggtgcgcgcgcttcgattctgcaagggttcgtcgagtcgagcaggggccgcgacgttcgcctgcaagtggtcggcgatcgtgtgattgcgggaatattgcgatcgtcgggaggcggggatttccgtgccaacatcgctgccggcgcatcggccgaacccttcgatgcgcccgagccgttcgagcgcatggcgctttcggtttgccggacgatcggcttggattttgccggcgtcgacatcctgttcggcgagcaggggcagcctgttttctgcgaggtgaattcgaacgcgcagttcgagggcatccttgcgtgctgcggggttaatgctgcggcggagatactcgcctatatcgtatcggtgctcgagaaaggtgcccgcaatggcggagatgccgtccggtgaaccgcgctgcacgaacctcgatggctattcggatgttgcccggatcgtcatcgtcgggaaagcagggtctttcgtgccatcgaacaggatcgatgtcgatgcaggctgggcgcgtcgaaacgggtttctgaatcgcgagctggttctcgtcggccgcgagggcggttccccttcggtcgagtgctgccttgtcgcgacttccttcgccgacgacggggaagacgatggcggattggtcgaagcgaaagctcagacgactttgcacgttatggagcggcttggcatcgatgcgggcgatcgcgcttgcgtttcgattcgcaagctctcgaatgcgcttttggtaaagcgcgttgcggtccagcgcatcgataaggtacgcgaaggcagcattgcggtttccgacgatctataccatgaactgagggagatcgaagaggggcgggcttcgaagcgaaggcgtttctatcgcctgaaccatctggctacgggggcgctttactacgtcccgttcgacaagatcgaacgggatccaagccttgccgcgcaaacggttcggttgagcagataccagcgaatgctgcttaatctgcacgctccgccctgcgttatggatggcgtgctcaaggatctggtcgaaaacgccgagatcgatcaggcgaccaagcaaagcctgttcgatcgctatgcccgcgatgtgctgttggttcccgacagctatgacgagcagcagtcgatcatgcggaatttgcgttcatgcggttacgatacgctgcagataaccgaatcggcgttcgaagagccttcgtcgctttgggcgaaggtgcccaaggccatttccggcttcatggtggggaacagctcgatccttttgaaaagctgtcgccctttcgcgaacgatgaagagcgggatattgtgagattgtcgcattcggctatggttcatctggggatcgacgaatcggacaaggtgattttgcgacacgggaaagccaaggcaagggctcgggcgttgcccatcgattcgatggagcgcatcatggaaacgaatacgatcgcccgcgaagccgacatcgatccgcttgtcggcattcccgcctccatgcggcgctctttgggcgtttgcgatctcgatgaggcggttctcgtcgagcgcgataccggttatctgttcaggaagaacttgaacgcgcaatccatgcctgtgttgctgttctttctcgctatcgtgcagacgggttatctgtttggaacggttgtgctcggatattcgctgctggcatcggtcgtcgggctgccgataattgcgttcatcatgttttccgaacagcgcgctaaagtgaaatgaggatggattcgatgttcgacccgatagcgtatctcgaaaatcccgcttggcgggtaagcaagctcggcctcgatcgcattgccgagcttatggagcgattgtcccgtcccgagcgaacgtatcgcatcgtgcatgtggcgggcacgaatggaaagggatcgaccgccgcgttcgtttcgagcgtgctgcagcatgccggaaacaaggtcggcttgttcacgagccccacgatcggggattacgctagcagcatcctcgtgaacggcgaaccgattccccccgagggcctttgttcggtaactcgagccgtgcgcgaagcggccgaggcgatggacgatcatccgaccgagttcgagcttgcctgcgccgtgtcgtttctgtggttcgaacgggcggggtgcgatgtcgccgtgatcgaggtggggcttggcggcgcgctcgattcgaccaacgtcatcgaggcgcccgagctgtgtcttttcgcgcgtatcgccctggatcatacaggggtgctcggcgcaacgctcggcgagatagcctccgagaaggcgggcatcgtcaagcgcggcgcctcggttgtttcgtggccgcaagagcctgaggccatgcaggcgatcgagcgtgcggccgaggggtgcggcgcttcggtgcgcacgcccgatttcggcgagctttccgtttcctcggtcgagctttcgaaagacggcatgtccggcatccagcggtttcgttatcgcggatatgacgacttgtcaatcggtctgctcggaagctaccagccctataatgcggcgctcgccatcgaagccatcgaggcgttgcgcgagaggggttgggcgatatccgatgaggcgcttcgatgcgggttggctgaggcgacgtggcatggtcgcttcgaaatcgcagccgtgaatccgacgttcgtgatcgacggggggcacaatccccaaggagcccgtgcgctcgccgattcgctcaagcgggtgtttcccggccggaaagcggttttcgtcataggtgtgcttgctgataaagattaccctgagatgctcgaagagctgctgcccctcgggagcgctttcattgtgatcgagcctccgaatttgcgtgcgctgcctgcggaaaagctcgcccgtgccatacgttggacagggcaagacctgctcggctgctcggcctgtacgaacccctacattgccgaagatatccccgacgcggttgcgaaagcccgcgagatcgcaggccccgacggcctcgtgtgcgcatgcgggagcttgtactcgattgcggagatcgagcgggcgctgtagggtcgatctccgcgcgcttcggacgcaggtttctgcaggtagccggatccagcctatcttgattacagcgtcctgcacgtttcgatgcactcctgtttgctgtggacgccgagcttcttgtagatgtgctggatatgggttttggcggtggagttggagatgtagagggcgttttcgatgccggcaacggttctgtcgtcgagcagcatggcgagaatctcctcttcccgtctggtgagtcccttgatccgggcgatgtaagccgcttgctcgatcgcatcggggagcgcctcctgatcttgaagcggcgttttcttgcttgaaagcgtcatgccccacgtgctggtgaagtctttgtcgctcatgaacacgacgaacaggatgacgatcgcggtggcgatgaggcagacgcacagggtgtaaaacgctgcgttctgcaaatgcacgtcgaacgaggcgtgaaccgattgcgaaatgatctgcgcgagcgcgagggcgctttgcgtgaatccgaacgtccaaagcgggtttacgccgtaccgaaacgatatgttgcataggacggcggtgatgaagatgctgaacaacgtgtaggccccgttggtcagaagcgagccgataagcgcggcgttgggcaggtcgatgagcgagcagagagcgcccgccacggccatcggcagcgagatgagatacagcgagcgaatgctgaaccgcttgaacagcagcaggatgacaacgagtacgatcgccgaaacgatcagcacgccgaaaagggcgtatcctcgtcccgcgcccgataggaatccccgtaggaagttgttgcagaaggtgaagcccgcgaacagcacgacgggtttgaggggaaacgaccagcccgacgaaaccgcctcgccttgcgcgaaggaaacgtgctcgatcctgtgcgaactgacgatcagaagcgccgttgaaacgagcgggaacgcaacgattgctcccgagacgaacgcgggggagcttacgagcgtgagcgcgaacgagagaaacgacgagagcgcatgcgttgccgtgtagtaggcgagaacgtggcgcatatccatgttcgcatacagctccatccatgcaaggtagagaggcacggtaccgacgctgataacgatcgatccgcaagcgttcatccaaagcgccgttgagccgaccgacgagcgggatgcgatggtgaagatggcgccgagcgacaaaacgacggccgctgcaacaagcagccggtgctttttatgcaaaggggtgagctttgtggagaggaaagccgctgccgcaaacaagatcattttcgtaagaggtccgaatggcagctggctttgcgcaacgagcgaatcgtctatcgagtagttgctgagcgaaagcgacgtgctgaacgagaccatgagaaagaaaccgaggaagcaaaagctcggaatcgatgggttcggtttcgctctgattgtgtttgctcgatcggtatccatagacctccatccctgccgctattctactatcggtgcggctcgtcgagtgcgagaatgcgccatcatgtccccgtatccttcatcgttcctgatcagatgctggagtatgagaaaaatcatcccgggtcctcatccctctttcgccttctcgcataggcgttctcgctgcatagtacgcctatcgcatcggacttccatcggttgatcgatgcgcagtacggcgaaaccaaggaggaatcgacatgaaagagatttcgagaaggaacttcatcgggggagcggcggcgttcggtctgggtcttggagccatggggcttgcgggctgtgcggcgggcgagcctgcttcgaccggcgcagaggccgggtcggcgaaccaaacgggcgtacaggatgcagcgggcgtaccctcgtttttgagggagcccgatccgatcaccgacgaccagattgcgcaaaccatcgaaaccgagcttgccgtcgtgggtcttggcgttgccggggtatcggcagtgcgttctgccgccgaggcgggcgtgaaggtcgttgcgatcgaaaagtgctccgaacccaattgccgctcgtctcagttcgcggcgttcaacaccgaaaacgcccgctcgatgggaatcgaagacatcgagacgaccgacctcgtcaacgagctcatgatccagatgagccaccgcagcgatttcaggattctcaagaggtgggcggataactgcggtgaggcgttcgactggtacgcctcggcctacgacgaccttatctgggtgcaccccggcgatgagacgccgagcgaagacaaggtgtacgtgagcaacaagaattcctatcctccctacgaatacgggcgcgatcatgaggtcattttcagtggcacgctctcgttcacggcgcccgagaagggcggccagaagccggtgtttcttgcgaacttcgagaaggccgaggcgacggggaacgtcgatgcccacttcgactgtccggcgcgtcagcttgtaaaagacggcgacagggttgttggcgtcatcttccagaacctcaacgaccagacctataccaaggtgctggcttcgaagggcgtcgtgcttgcgacgggagactacgtgcgcaacgacgagatggtcgcgtactacctgccgtggatttacaaccagaaggaaaagttcacctttacgtatatgcaccaggatatcgaagggaatttcgccgatatgggcgacggccaccgcatgggctattgggccggcggaaacatcgaagcggggccgcatgccgcaatggcgcacggcgatttgggcaaacttggcgtcgaggcgtttttgcagctgaacggaaacggcgaacgctatatcaacgaagatctgacgaacgaccatttcggttccgcattgattcgccaacccggcaacgtgatctaccagattttcgattcgaagtttcccgagcagcttccttcgatgcaggcgggcctcggcacgaagagcaagatctcgcaagaggatatcgatgcgatcgacgattggacgagcgccaagggcgataccgttgaggatctggtggccaacctcggagtcgaagccgatgttgccgaaacaatgaaagcgcagatcgcacgctataacgaactgtgcgctgccggcaaggacgaggatttcggaaaatcccccgagcgtctgttcgccttggaaaccccgccgttctacgcaattcgctatgcggttggcgaacctggcttgagcggtgcctcgcaggatgccctgcgctgccttgtaaccatgagcggtctttcgacaacgaaggacgccgaagtatgcgatgccgatctcaaagtcatccccggcctgtacgccgttggaaacgttcagggcggtcggttcctggcggattatcctgcaaccattgccggtgcgagtcacagcatcgcaatgacgtacggctatctgaccggcaagcacatcgccgaaagcgcttagagcgaaaccgatcatcagcgctttccgtcaagacccgccccgcgtgctttctctgcatgcggggcgcggggctttcgggcgagagtgcgcgaattcgaacgggtgccggggttgaaagtggagtcgtgggcggttggggatttcgattaatcgagaaatcggtcgattgtggctataatggagcgatcgagtgcaggcgcccgtcgaaacgggcaggcgaagaaagccgattgatccagtgagcatcgacagccgaaaagagcagggcatcgcgcgcatggttgcgcgcttcacgccgcttcggcggttcggctggtcctttctgctcgcatgggtgttctgtgtgttctataccgaggtggtcgaggggtatgcgggcaagctgggcgtgtggttcggggcgtacggttcgttcgagctattgttcttcaccgggtttcccgtgttcatgtcggttgtcatgctcgtcgccatcgtgctcggcgaaaagcggttcggctccccgaccgagcatctccccctcttctttatcgcacctgttgcgacggcgctttccacgccgcttctgttcggcattacaggggatgtcgcgttcacggttgcgttgttcgttttcggcgctgtgctcaccgggttcggcagcgggttcatgtgggtgatgtggggcgagtactatgcgcgcgtttctcaggaggacggcgaatttcttgctcccgtgtcggctatcttctctgctctgctcgtgctgctcgtatcggctatggacggctggatcgcgcttgcgttcgtaacgtcgttgccgcttctttcggggctgtgcttctatctttcctggaaggacgtgggcggctcagccactgcagagcattccggggcttcggagcagaaggcgtacgactatgcgcgcaaccttgcaaagcaaagccttgtgagcgtgctcgcctcgatgggcagggcggggctcggtatactggttgcttgcctgttcgtgtgccttctcggaacgttttggccggctcccgacaagcatgcccctgagtttcaggcggtgctgcttgcaagcattgcgttcatggccgtcgtctcgttcgcctcgacggtaggccctcggcgcatctcgattgcattcctctaccggtggatgtgccccgtcctcgtgatggggtttgtggcgttgatcctgttcggtacgggtttgggcggatactgggcgtttctgatatccattgccgcgcgcttcgccttctgcgtgataacccagctgtacttcgcgcggtatgcggtggcgggaaaggcgacggcggttcaatcgtacggtctgggttggatattcgtccacctcggcgatttcctcggcgtgctgctgtatgcggggttaaccgagcccctcgacagcggcagcctttctgcggtgcaggtggcggcagtgtcgatcgcggtgcttgtggtggttaccatgttcgtgctgaacgacaccaagagctttgcgtttgatcgagaaggctcgcgcggcagctctgttgatgtcccggcggttcgaaccgacgaagcggatggtcgggagcgttcgggtgccgagttgtccgatcgaattcgcgaactcgcgctgcgcttcgagctgacgcctcgcgaaaccgaggtgttcgagttgctcgcgcgtggaagatctataccctatgtgcgcgatgcgctcgtcatatcgaaagaaacggcagcgacccatgcaaagcacatctatgcgaaactcggggtccattcgcgccaagaactcatcgatttggttcactgagaggctgccgagagcggcgttctaaggtgttgccctgcgcggcgggtacggcttggtgccggcctgttggaatccgcgcggcttgaaagaaaaaggaccggaaacttcggtttccggtccgacttgtgcagagcgctctgcttcagatgagaacccttccagagataatcgccttgtctcgatgcctacgatacgccgagcgcatgtttggctgcgatgcgggcgaaggttgccacgcgacccgcgttgattccagtgaagttgctcgggtagttgtgcgggtaaaaaccgccctggtcgttgccgcagacgtagaggttctcgatcacggtgccgtcctcgcgcagcggctggctgttcgtgtcggtaaccacgccgtgggtggtgacgagcagctcgcctgcgatgcgcgccgcgtagtagggaggctcgtcgaccgcgctcatgcggaacggctccttgccgaaatcttcatcttttccagctgcaaccagctcgttgtagcgctcgaccgatgcgatgaaggctgcggtcttgtcggcgtcgaagcccatggcgcttgcgagcttctcgagcgtatcggccttcttgatggcgccgctttccaggttgggtgcgaaccagaagctgtcgagatgctctttgcttatggcctcgcagtcgtacacgtcggcgttgaacgcggttcccgagggcgcgggagccaagcgcgagcagccgcaggtgtcgaactgcacgatatcgtcccagtagctcgcatcccagatttcccacgagaaatgacctggctggttgagtccgcccgaatagctcatggggtagcactgatcttcgttcatgaagcgctcgccgttggcgttgacgtgaaggaacggctggcttcccggcaagaagatctggccctgccacggacggccgaactcggtgtcgtcgttcatgagcccgcggttccagatcatgcacgagccgccttgctcgagataggctcccgcccaaagcgccatcctgatgccgtcgccctcttcggttacgctgtcgccgagcacgcagtattccgatacgacggggcagaggtcttggagcatctcctcgttggccccgtagccgccggtgcagatgataacgcctttgctcgcgttcacctggatgttgcccttgtccttcgaagtggcgatgactccggttacggcacctgcatcgtcttggacgagctgttgggcgggagtggtgaaaaggatttcgccgccgagctccaaaaacacttcgcgcatcatctcgaggtgcatgtaagcgccgtagttgggaccgtcggggttgtattcatcgaggcaggggttgtagcacatggccggatagtatgcctcgggggcgatgtcgggcgaggggcagtgccattcaaacgggaagagcattcccttgggctcgagcgtctctttcatccattcgatcatctcgccggatttttccgcccaggttttgtacatgagcatgttcgcatcgccggattgcgtcatgttggcgtggttcatgagtttggcggggtcttcgtagtgatcgggctcgaggttcgaattgagcgcaccgatggcttcgcgtgccatagcgatatcgccgcccttttcgatcacgatgacctttgcgccttcctgcgcggcggtggttgcggcaacgaggcctccgtttccggcgccgacgactacgatgtcggcctcaagcgtttcggcgatgtcggtaatgggctcgggcttgtcgcgccacgatgcggcggtgtcggcatcggcctttcccgtcgagccggtttcgcccgaagcgctcggggcgcaccctgcgagcgcgctggttgccgcaagggctcccgtggcggtgagtcctgccagaaagctgcggcgactgatggttttctctcccatgattttcctcccgtttgttcgatgtgttcgagctgcccgcgttcgcgatgcccgcacgggcggctttcgcttgcccggcgcgtccgatcgagccttgcggtgcgcggtggtttcactataggaggctgtgcgggcgcggccatcgcgtgattgcgggtattttcggccgtatggggcttgccggtgaaaatacccgaaaaggggtgagatgagaaaagggctggtaaacgggttaaacgatgaccgccattttcgggatggtttcccgcgggaagaaggctggcgaaggaaaccccttgaccctcgacatggttcagggtctaccgtggggatgcgtcgtttgacgctacgaggaacgatcgagtacatttccccacctcgcaagcgccaaatgacgatacgggtatcaatataccacagtgccttgaaggcgttggttcgccttagggcttcgtatgccgatcgggtttgctattcttccgcatcgcttttcatgagatcgatgcgatcttcttttacctcgcgaattctgcgcgcaaccatgtcctcgagttctttgcgcgagtgaatgccgcatttctgatagatgtggcgcaggtgggtttttatcgtttcctccgacaaaacgagctcgtcgccgatttcggcccggctctttccctgggccatttggagcagcacctcgcgttcccgcgccgacaaccggtattgcccggcaatctgcatgcagcacgattctgcgatttcgcgatcgttcagggtttcgccgggttttaccatgccccatgcttcaagcaggttgttgtggcttacgaggaagagcgctgtcacaagcagcacgagcaacacgcttgcgacaagcagcgagacgtcttcgcgtccgacgagcgggtggaggagcgtgaatagctcgaatccgaggaaccggcctgcgagcagcgtgccgatgctcagaccgccaagccagatgggcgaaacgcttcgatgccgaatgaggtaggcgcacaggcaccagacgagcatgtcgaagcaccggtagcccacgcagtagattccgtagccccatgaagaggcttcggagccgaacaggcaaacgaatgcgcccgtcgccatgatgacgaacgagacgcggtagatcatgtagttgaagttcatgcgaaggaccagggtaatgagggcgaacagcaccgatgcaacgagaaacccgacaacgccgttggcgtaccaagcggttgtgccgaacgctcccgtgaacgacaggctttggaaaacgccgaaggaaaagcccgctacgagggttgtgagaagcagtttccagggcgcacgcggggcttttggaatcgcaagtcccacgggggacggagctgccgttcccggcgcatcttcggcggggattctttgcgccatgcggtacgcgcacgccgccgcggccacgccgacgatggcaggcatgaactctctgacgaattgcggaaagaaattcatggcgaacaggagtgccgagccgagcaccgatgcagacacgacgaaggcgatggtctttctcggtccgactccgccgaacgccttcatccattcgaggaagagcagcgtttgcccgatgccggcgaaaacgggccaaatgaaggaaacggttgcatagctcgggtcgagatagtcgatgggcagcttcgaaagctgtacgaaaagagccgatgctgcaacatagcaaacgcctgcaatgactgcaacggcgctgttcgggaagcgctcgccgacccttctggatccgatgccgaaggctatgcctgcgataccgatgatgaggtacgtgaagttcgatccgatccaaacgggggagccgaccgtgaccgcgttggcgtacgcaagcgttgcagacgtgcacgtccacggccaggcgcagacgcatgcgaagcctatccaaagggctggattcgaggcgacgatctgcgtgaagctatgaaaagattgctgtattgtgcgcatgtcgcgatacgccgattcccttggcatcgaagcctcctcccactgcgcgagtatagcacagcggtgctccccgcctttcgccggggagcacgtgagggttcggtgaggccggccggttaatctacgaggcggcgtttgcggcggctgccgctccagcgtatcggccgaagcagaagcacatgcacagcgacgtgcccgattgtggatagaagtagccgatcaggtgtccgtttgcggattcgcccacggcgtagaggttcgggatgaccttgccctcgacgtcgatgacctcgccatcggtgttggtgcgcattccgccggtcgtgccggagagggcggttgtttgcacggtcatatcgatggcgtagaagggggcggttgcgagtgggttgagaagcgtgaactccctttcgacgagatcgaggtcgtattctttggtgtcttcggggtcgaatacgcggcccatgcgcacggcgggtttgccgaaatcggggtcttctcccgcttcgcagtacccgttgtagtcttcgaccgttttcttgagggccgccacgttgacattcattttcttggcaagctcttcgatcgtgtcggccttgacgatcgatcccgcttcaagcgctttctcgccggttcctgcagcaacctgctcgtagagcgtcgaatcgtaaagcgcccagtattcggtgatgccctgcttgtaggcgatgccggcgcggtcgaggaagtagaggttctcgttgacccatcgctttccttcgcggttgacgaacatgccctggcccgggttgtctccgtatccgccgtcgacgtttacgaagtaggccatggtgccgccgggtgctacgacgtcggccgatacggtcttggcctgcgaaagggcgaagccctgcgattcgccgtcgaacgtcgagcagttcggcgttcgaggggcgtacaggcgcagcatgtcgggggagccgccgaagccgcctgccgcgacgataagcgacttgaggttgaacagggtccccgtgttgccggaaaccgtttcgactccggttactgcacccgagtcgtcggtgacgatcttggtcgcttcggttgagaaacggaattcgacaccgagttcttcggccttcgccttcaggggttcgaggtaagccttcacgccgtcgcgatcggcgcttgttacgaacgtgcgagccggaacctgaaaggggttggtgggaggcaccgtcacgccgacgatatcgacgccgtgttcgatgagccactcgatggattcggcggagtgctgggcggcaaacagctgagcttcggtatccatgaaggagtcgctgtcagggtattggttccagaatgccacgagctcctcgggcgtccaatcttcgccgagctctttttggaacgaggtgccgacggcggtgatgctgtgggcgtagatcttcttgagtccgtcgagcttttcgagaacggtgaccttggctcccgattccgccgccgagatggctgccgtcagccccgatacgccggttccgattacgacgacgtcggcttcaacggtttcggtcatttcgacggttgttgcgcctgcggaggtctgtttgggttcctccgcggccgaagcctgctgctgcggcgcatcgctttgcggcgagcagccgaacatgcctgctgctgcaatgccgagcgctccgacgcccgctcccgcgaggaacgtgcggcgggtgacgccggctatagggggttggttcgatatgcgagtattcatggttccctccattcatgtcgatacgacgcggatgcgtcgacgaagaagataaggcggaaccggaaagcgcgatatcccccgtgcgggagtgacttgcgggcgattgcgctcacccgcggcgggggatgctttaatcaggggatacgcgaatcgctatgctgtggcgggggcggtagcgggaacggcggcgcgagcgatggcgatggcagtggtgactcgtgcggcggcgcgaacccgatcggcagacgctttgatgcgatgcagcgattttgcgggttggtatgatcttcctatacgaaaatcgcatcgaaaatggcggtcaaggcaagcttctgtcggaatcgagcttgcttagtaacttatttcatgatagcgaccaggggaaacgctaacggtaatgctcgaatggcgccgaaaatgcctcctgtgagctccaaatggcgacagaagcttgccttgaccgccattttcaggccgtttttccagaggaagcggttcggcctgtgtgattccgctcttgcttcaggcgtttactcggtaacggttggctcttcgccgtcggatgccgtcggaatgcttatgcccgcatcttctgccgtgttcgcttccgccagcgcggcctctttgcccagggagaatccgatgaggacgccggccatgacgatgcagattcccaccatgatgcacagtacgatggcgttgcgacgcgatgaatcgtgctttctgaatatcgcacgatcgccgccggagtagattgcgcttgaggaccggacgtagggatgttctgcgatagggacgctgtcgcgtttcgggagggaggcgcggtttgaagagagcgacgtattgcgggtctggttaaacgacccgctgttgcgcttatgtggcttggtgccggaggtgtaccgattttgcataaatgcttacctaccatacccgcaagatgcccgaatggcactaagtatagtggcaaaaatgtaatttgtacactactaatagtgtgttttaacgattacttgaagataaatcgcctgatgcccacacgaacggccctgtgaagtgcgatttctgggttgtaataatttatattagtatataatacaaaagccataaatgtattaaaaatgaggtatgccatgtatacaacggtcagcgcgcgactcgatgctcgtttgaaagaggaggcagaagcggttctgtctgccctcggcatatcccattccgcggccatcgccgccctctattctcagatagtgttccagcagggccttccattcgatgtcaggatcccgcgcaaaaacgcgaggatggggctttcgtattgggagctgcgcgacgccgttcgcggcattgccgaatcgtgcgaggtgcgtgcggtttggctgtacgggccttatgcgaccggcgctgcggatgcgggcagttccatcgatttgcgcatcgacgccgaagagggttccgattttgatacagagtcgtttgcgcgcgccgtcgagcatttgcttggcgttcccgtgcgcgcttcgcttacgccgaacctctcgcggaaattcctcaacgccattaaagagacggaagagattctctacgagcgcgggtagcgcacgtcgtccaggggatgcgggcgtgagtctgggcggaggatgcgggcgtgcggccgatcggaggatgcgggtagcgcacgtcggtccagggatgcgggcgtgcggatgggacgggccgcgccgggggcgttgttttgaagagtgggaatccgagtatctgccagagcctgcggcgagctgatgaagtcgcccgccaaagcctcatgatttcttcagtatgaggaagaatcagacatctagtctgagggatcatacccagtatcaagcaaatcgtgggatgcgatgcattgctctctctgggagaataatttgcagttgcagcggttgcggcgggcgaaattcctgtaaggccgcgaggcagcttgcgtgcggcagcctttgcatggtttgtgcggatatcgacgattcgaagacgcgatgcagacgttgtgagcataatgaaacagtagtttgtcagagaaaggaaacgatatgtgcttcagaccacccactatcgaagccggccccgttaagtgccccaagtgcggagcagaggtcgaccccacggcagacaagtgccccagctgcggagcggaagcgaccaaggctcccggcatgcccggcgcccctggcgctcccggagttcccggtgcccctggcgctccgaaggcccccggcgcccctggcgccccgagcgctccgaaagcccccggcgtgcctaaggcccccggcgcgtaggacgcgtacatttactgtcccggtatgtagatcggaccccgcgcagagcagtgctgtgcggggtccgattgcgttgcggggtggcgcgctgaaacgggtcttggcgaaaaggtcgcctttccatgctggcaacgggttccgcgagcttttcgcggggcgagcttcatggggcttgcgacatgttcgaccattgggctatcctacagatgataatggaatacgttttcttttcgcgattgttgaacgctacgggggggggagtacacaatgggcgagaaaacctatgcgggcgatgagggtgaagcctcgttcggattcggcatcaacgcggcgcttcgtttgggcgatgtcagctacaacatgcttctcgagaagctcaggcccttcgaagtgctctattcgcccgaaagctcttcgacccggttctcgtggtacgcatcggtgccaagcaagatggggtatctcgatcacaggcgcgggagaaaagccctcttcctttgccacgaagaggttgccggtgatcttttggacgtctatccgggaagctattgcgtggtgctggttgacgatgacgctttgcccgagcttctcaatcggaaaaactatcggcatcgcgtgatagtgatcaggcaaagcaaaaggttctacttctacgattcgatgctgcagtctttgttcgtcaacgatcttatttgggaaaacgaaatggatagggtcgtttacaacaggggacggctggatcggttgatatcgctgagcgaagaaatgctcgggaatttcatctgcattaccgatacgggatttaatctgatagcctattctcgcggcatcgagcccccgcaagggggagatggctaccgctacctcatcgaaaacaactgctatagcgcggatttgatacatgagatcgaagaccgcgtgcttgcggtggctaaaaaacagaatcagctttttctcctcgagtctaacgagagtcattcgtatccggtgctgcactaccccgtattcatcgacaacgcgtatcttttccatgtggcgatggtttgcaagacgggttccatagagtatttgcaggacatcttcatgaagttcatccgtcgggtggtttccatctgcaatgatttctggaaaacgaccgtcaacctggaggcatcgtggcacagggtgctcatcgggctcatagacggggagcccatgaccgacgagtacgtcgatgcccagttggccaaaaccgcgattcccgcagcgaggcagttcaggctgttgctctttcgattcagctcgcataaatcctaccaggagcgatctcgcaccatcgaagcgacaaaagagctgaacaacggtttcgtgtatccgttcatgcacaaagacgatttgctggctttgctgttctcgacttcgacgaacgacgccgcgctttcaggtgcgggcgtgttcggtgacgtgggggagttggttttccagcccttcgggattgccgccggcgcctcccaggtctttttcaacatagaggacatcgaatacgcgcatcggcaggcgtcggtcgcctatgccatgcgggtgcccttgagaaacgaatacgagtccctcaacggaagccctgacgttccctgttacgcgttcgagcatgttttgaaatactatatcctgacggaggggttcgattccgatctggtggacttttcgttcgagcacagcattctgaaaagacttgccgaagaagaccgaatcgcaggcacgaacatcgtgcaaatggtatgggtctacctgaacagcgaccgcaatgcgaccgagacctcgaaactcattcacgtgcatagaaacacggtgctctaccatatcgctcgattggaaaaacggttcgatatttcgttcgaatcggctcttctcagaagccgcatgatgcttgatttccatcggctattactcgaaaacaagctatagagctggtgtttcagcctgttctacaaatatcgccccttattttgtgatctcagccgatgaacgtactcgggttcgtttcatacaatgcgtagcgtgtagacgaggaagcgaatcggccccctgtcggatgtttcggcagaaggcgattggcatttctgagctggccggctgcgtatgctgcacgcaataaccatggaagatcttctataattagaatcgatatgcagtcgaacgcatgtgcgcatgcggctgcatgcctcacacaacaaagggggttgtgtatgttcactctgaagaacagcaaaatgcaggccgccatcgtccttatcctggtttggctcggcgtgttcatcgcgtcatatgcccaaaaccagcttgcgggcatgtcgacccagttcatggagcactatggcttttctgccgagcaatatgcggcaatttactcttcttcccagttcatcggcattttctttgcgtttgtctcgggtattctctccgataagatcggcacgcgcaaaatagtcttgatcgctgccgccatggtgttcatcgccgccgtttgccgtatcttcgctttctcgttcgaggcgcagtacatatcgaacatgttctgcggtttcaccggcatgttcatggctgtcaatcgcgcgaagatcctcggtggttggttccctccggcaacgatagcgcttgccgtgggtatcgcgaccacgacgacgcctgtggccaacacgctgggcgtaggcctgacatcgctcatgccttccgtcgagttcgcctttgtcgttacggccgttatcgctgcggttttcttcttcggttggcttttgttcggcaaagagcgctcggacgagatcgcggcggccgaggatgctgcgaaaaccgaggattccggcaaggttctgaaggttctcgtcgacgttctgaaaagcccctgggcttgggtgtgctgcggcgcggcgatgttttgcatggctgcccaggttccggtgatggcgttctcgacggcagctctccaggctttgcgcggaatgtctccagttgaatcgggcgcgatgatcaccgcgctcactatcggcatgggcgtcggttcggttgtatctcccatcatcgttcgggccatcaagaagttccgtcccatcattgtggtgtacacggtgattacggcgcttgtcatctactttggctggcagatgccggctggcccgatcatgtacggcgtgtatttctgcggcgggttctgcctcggataccttctcgcgatcatcttcacctatccggttatgatcttcggtcgcgagaaggccgctacagcgggcggtttggttcagacgttcgttctcataggagcatcggtcttccttacgaacgtaaccattcccttggctggcggcgcaagccccgaaacgttcccgaccattttcttgatcgccactgtcttcgtggtcgtcggcggcatccttctgttcgtgcttcccgatcaggggaagaagctcgtgaagaacaaggctgccgttgagggcgacggcgagggcaagggcattacggcataaggcatttacgagaggattcaatcatgtgttttagaccagcagaagcgaatgcgggcgcggcttgcccgaattgcggtaagaaaatcaacgtgacgcagggcctgcttcccaaaaagtgcccgttctgcaaaacgagcctcgaggggatcgacccggcatccttggcgcctgctgccagcggcgcggcaccggctccgagcgctccccaggcggccccgagcgccccgaaggcccccggagcgccaacggcgccgaagcctccgacccagcagtgatccgagtttgccatgtgcttcggaagctgtcgggtaacctgcgacaactgcaaacccaagtttgtctactgccctgattgcgggcacaagaacatgcttgtcttcaaggcgtgcaagcgatgcggaaagcctctgacggaagaaatgaaggacgcggcaatcagagattgggaagagcggtcgaaggcgcgtaacgaaagctgacggcatcgacgcaaaaccgatggcaaggatcgcgagcgatccgccaaaagggaagcgcaccagcttctgcacgcaggggaagctcagttctcgtggcgaaggcgcctgcgaaatccgagcgcagaagctggtgcagtttagcgaagaagacgagcgggaaggaataccaatgactatggataaagaatggaaggtcgacgaaggcgagctcatccgcacccgtacgtgcggttggtcgcctccggggtgccatccggtgggatgcggcatgttcatctacaccgacaaggacggcaagttcgtcaaggtcgagggcgaccccgaccacccgatcagccaggggcgcctgtgcccgcggtgccttgcgatgggggagttcttgcagcatcccgaccgcatcaagtaccccatgaagcgcgccaaggaagaccgcggcaaggatacgtgggagcgcatcacctgggacgaggcgctcgacatcctcgaaaccgaggttcgcaagatatgggctgattacggccccgagaccatctacctgtttcagggaaccggccgcgaagcgacgctgtacgctcctccgatggcccaggcctgcttcaagacgccgaactgctcgttttccatgagcggcggatcgtgctacggaccgcgtacggtcgttgccgacttccttctgggcgcgggctatcccgagcttgactatgcggcctatttcccggatcgctacgacgatccgcgctacgaggtgccgaagtacatcatactttggggcaagagcccgctgcagtccaaccccgacggcttctacggccacgccatcgtggacctcatgaagcgcggctccaagctcatcgtgatcgatccgcgcctgacctggctcgcatcgcgcgccgagtaccacctgcagctgcgcccgggcaccgacgcggcaatcgggttggccatgctcaacgtgatcatcggcgaagatctctacgatcatgcattttgcgacgaatgggtgttcggcctcgacgagctggccgagcgcgtgaaggacacgacgcccgagtgggccgagggcatcacctgggtccccgccgacgtcatccgcggcgcggcgcgcgccttcgccaccaacgccccctcgtcgatcatgtggggccttgccatcgacacgcagcagaacggcgcgcaggcggggcaggttcttctgtcgatcggagccatctgcggatacatggacgtgcccggcggcatcacgcttgccttgccctcgagcttcttgggacgctggacctacgagaccatgcagttcgtcgggaaggagacggagaagaagcgcatcgacgcgaaggacgatcatccagcctatgcgacaggcccgtacgctcatcccgattcggtgcttaccacgctcgagacagaagagccctacgcgttccatatgttctacttctacgcgtcgaatcccatttcgcctacctgctatgcggagcccgagcgctggtacaacggcatcatgaagatggatttcaacgcggctcaggactgcttcatgacacccaccatcatgggcctgtgcgatctggtgcttcccgtcagcttcttccccgagcatgatggtttcgtgctcccgcacttcgggcgcaacacccacttcctcggcgccatgaacgcggctgtggatcccggcgaggctaaatccgaccttgagatcgacatgctcgtgggcaagcgcctcaatcccgaggcgtggccgtgggattccgtcgaagagttcttcgacgcccagatccatacccagtacgaatggggcttcaacgagctccgcgaattcggggcgttccaacagccgttcgaataccgcaagtacgagaagggcatgctgcgccccgacggagagcccggcttcaacacgccgaccggattgatcgaagtgagctcttcgatctacgacgacttcggcgaggacggcctgccgtacttcatggagcctgcgatgagtccctacagcacgcccgacctgtacgaggagtacccgctcgtgctcaccacggggggacgcagcttcgtctcgttccattccgagcaccgtcagattccctcgctgcgctcgcttcatcctgatccgctcgtcaccatcaacccgaagaccgccgagaaatacggcatcaaagacggcgacttcgtgtgcatcgagaacccgttgggcaagtgcgtcgagcgggcccgcgtatcgaacgaggtgtcggagcgcgtcatacacgcggagcacggctggtggtatccggaggacgaccccgagtatcccgatctgtacggggtatggaagtcgaacatcaaccgcctcatccccatgtacaaggttggcgtaacggggtacggcgcaccgtacaagaacgtgcttgcgaagatatacaaggttgacggctacgatgccgcaaaggagattcccgagtcgtacgtgccgcgcgagagccgtggacccgaaagcatgacgaacggggcgcctcagcccatgagctacgaatctattcaccaggattaaggacggggtgacgaaatgaagaagcacgcgctgctcatagactacaagtactgcaccggctgccacagctgcgaggtggcctgccgccaggagaagggcatcgagtcgcaggacgagtggggcatcaagctcgccgagttcggccccgagaggctggcgggggaatggtactggaactacgtgcccgtcccctcgtcgctgtgcgacctgtgcgcctcgaggctcgaggagggcctcaagcccgcatgcgcccaccactgcctcgccaagtgcatggaggccgtgcccctggaggacgtgcccgcccgcatggcggagctcggggacggggtcacctgcttcgtgccgtaaggttcgacggacctgctcgcggtagggcggtgcgaaaagaccgcagcttggccgaccgaccggtcgagctgcggcgcaccgcccgagcaaggagaaacctcgggccgattgttggttgttgctgggaataagggggattctgttgtggataaagtctacgtttcagacatcatcgaaaaaccggggggtatgaagttttccgttcggatcctgctcttcgtcgggctggcgatggtgttcgacggattcgactacatgatcgtgtcgtttacgatgcctcagatcaccgaggaaatgcagttgggtttcatcgccaccggcagcttggcttcgttcagcctcttgggaatgctcattggcggcttcctgtcgggctaccttgccgacaggttcggccgcaagcatgtgatgaacgtgagcatcatgatatacgcgctgctcacggttccgatctttttcgtccatacctacgacgcgtttgccgtatgccgaatactgtcgggtatcggagtcggcgccgtcattcccttgagcgttaccatcgtttcggaatacgcgccaaccaagcatcgcggcgcgttcgtgaccatgaccaagacattcatgatgctcgggtgggtgcttgcggggttgacggccatgtacgtggttccgaacttcggctggcgcatgtgctatctcatcgggggatttcccttcctgtacgggatactcatgcacttcatcatgcccgaatcggtgcaatggctgctgagcaaaggcaagacggcagaggcgctcaagattgtgaacaggatcaacgatacgctcgattcgccgaaagaaggcggctatacggttgacgagatacggatacccgaggcggaaacgacgggccagctccgtcagatcgtatcgaagaagtatctgaaggttacggtgggcatttggctggtcgcattcactacctgcgcgctgtcgtatggattgacgaactggatgcccacgatcttgctgcaaagcggatattcggtaagcgcgagttacgggtacaccacgcttatgaatctgctcggatgcgttggcgcggtagtggcgggagtcgcagccgatcgccttggcaggatcagaagcgcgtacgttgcgttctttctcgccgggttgtcggttgtgttcacggcggtgttcgggttcggcggattgatgatcgtggcgtgcatattcatggggttcgccatcaactacgcctacatgtctccagcgcccatcaccatcgaggcgtatcccaccgagatcagggcgacggggcaggcgtgcgttactacggttgcccgaatcggcgggttcataacgccgatggtaatcggcggcgccctcgaatcgggatcgacgttctcgacggttctcatcgtgtttctcgtcccgctttgcctggccgccatttttacgaagctgcttatcaagacggagacgaaaggcgtcgcaatggaagatctcggcaatgctgcctgacgattcgccgcatagagggaaatacatctaaggaaggagtacggttatgacaatggctcagacgtggaaaagtgacgagggggagctgatcagggttcgcacctgcggttggtcgcctccgggggatcatccggtaggatgcgggatgttcatctacaccgacaaggacggcaagttcgtgaaggtcgagggcgaccccgaccacccgatcagccaggggcgcctgtgcccgcggtgccttgcgatgggggagttcttgcagcatcccgaccgcatcaagtaccccatgaagcgcgccaaggaagaccgcggcaaggatacgtgggagcgcatcacctgggacgaggcgctcgacatcctcgaaaccgaggttcgcaagatatgggctgattacggccccgagaccatctacctgtttcagggaaccggccgcgaagcgacgctgtacgctcctccgatggcccaggcctgcttcaagacgccgaactgctcgttttccatgagcggcggatcgtgctacggaccgcgtacggtcgttgccgacttccttctgggcgcgggctatcccgagcttgactatgcggcctatttcccggatcgctacgacgatccgcgctacgaggtgccgaagtacatcatactttggggcaagagcccgctgcagtccaaccccgacggcttctacggccacgccatcgtggacctcatgaagcgcggctccaagctcatcgtgatcgatccgcgcctgacctggcttggatcgcgcgccgagtaccacctgcagctgcgccccggcaccgatgccgctatcggccttgccatgctcaacgttgttttgggcgaggacctctacgaccacgagttctgcgagaactgggtgttcggggttgacgatcttgccgagcgcgtggccgacaaaacgcccgagtgggcagaagagatcacctgggtccccgccgacgtgatccgcggcgcagcccgcgcgttcgccaccaacgccccctcgtcgatcatgtggggacttgccatcgacacgcagcagaacggcgcgcaggcgggccaatcgctgctcgcgcttgctgcgatctgcggctacatggacgttcccggcggcatcacgctgtctttgccctcgagcttcatgggacggtggcgtttcgagaccgcgcagttcgtcgagcccgaaaccatggcgaagcgcatcgacgcgaaagaggaccatccggcatacgcatgcgggccgttcgctcatcccgacgaggtgcttaccgtcatggagaccgaggagccctacgcattccacatggcttacttctacgcgaccaacccgatttcgccaacggtgtacgcggaacccgagcgctggtacaacgcgcttatgaagatggatttcaacgcagctcaggactgcttcatgacgcccaccatcatgggcctgtgcgatctcgtgctgccggtcagcgggttcgccgagcacgatggcgtggtgctcccgcacttcgggcgcaacacccacttcctcggcgccatgaacgccgcgctcgatcccggcgaggcgaggtcggatatcgagatcgacatgctcgtgggcaagcgcctcaaccccgaggcgtggccatgggagaccgctgaggagttcttcaacgcgcagattcgcacgcagtacgattgggatttcaacgatttgcgcgacatgggcgtgtatcagcagaacttcgagtaccgcaagtacgagaaggggctgctgcgtcccgacggcgaacccggcttcaacacgccgacgggtatgatcgaggtgtgctcgtcgatctacgacgacttcggcgaggacgagcttccctacttcatggagccggcgatgagcccctacagcacgcccgatctgtacgaggagtacccgctcgtgctcaccaccggcggccgcgacttcgtctcgttccattcggagcaccgtcagctgcccacgctgcgaaacatcacgcccgatccgctcgtcaccatcaacccgaagaccgctgagaaatacggcatcaaggcgggcgacttcgtgtgcatcgagaatccgctgggcaagtgcgtcgagcgggcccgcatctccaacgaggtgcccgagcgcgttatccatgccacgcatggctggtggtatcccgaagaggacggcgagttcccgaatctgttcggcacgtggaaatcgaacgtcaacaagcttatcccgatgtacaaggtcggcaagctcggctacggcgcgccgtacaagaacgtgcttgcgaagatatacaaggttgacggctacgaggcgggcaactcggatccagcggcatacgtggcgcctgcgagccgtggacccgaaagcatgacggccggaagccccgctgcgctgagctacgaagccaaacacgacggtgaatagaaagcgaggtgagacgatcgtgaagaagcacgcgctgctcatagactacaagtactgcaccggctgccacagctgcgaggtggcctgccgccaggagaagggcatcgagtcgcaggacgagtggggcatcaagctcgccgagttcggccccgagaggctggcgggggaatggtactggaactacgtgcccgtcccctcgtcgctgtgcgacctgtgcgcctcgaggctcgaggagggcctcaagcccgcatgcgcccaccactgcctcgccaagtgcatggaggccgtgcccctggaggacgtgcccgcccgcatggcggagctcggggacggggtcacctgcttcgtgccgtaaggggttgaggcggggttgaatcccgactgtaagaatacgattgagatggaggcccgacatggcatacagtccgaatcagaaagacgttgagggcatcgaagagattgccgacaaagcgccgaaggtgtgcccgaattgcggcaagccgttgcgcaagatcgttacgagccgagagttcggcagcttcaccacgaagtgcccgtggtgcaagaccaagttcgattacgagatcaaagaagacgagtagtctttctcgcgcaaacgttctcgtccagacgggaggccgactgccggcctcccgtctcgggctttaccgcaagcgccgcaccgcgtcgtttgcgccgtgcgcgccacatggcgctccggctgccgaaagccgccgccgtctccaggcggccttcgcctttaccgccgcaagcgaaagcgcgagcgaaaccaggcataccgccgcgaagaagacgagcgagttgcctacaacgatatcggttaggccgcatgccttcgcagcgccgcgcacgagcacgatgcacagcgggtgcaggatgtagatccacagcgagaggctgcgcgcccaggaggcgttgagccgcaggggcgtccgtgcgagtacgacgatcaggaaatacgttgcgggagcgagcatgaggtacatgctatcgtggcggtcgaggccgagcccgtgtacgagggctccttcggctacgagcagcgcagcggacgcgagcaagcccgcgcatcggatgccctcgttgcccgacccggagacctgcttcgatgcgatgactccgataagcaggaagagcggcgcgaaaagaacgccgttgcgggtatggggcgataccgaaaacacgacgtcgtagaagcttcgcagcgcatccgcctgagaggccaagccgtaatagctatcgccgagcatgccgacgaggtacagtgctgctgcgatcgccagcgagattctcattccgaaccgatcgagcagaagcgcaacgagcacgcagccgaggatggaagcagggaagtaccacagatggtagaacgtgccctcgaatacgagggcttgtacggcggaaaacagcgagtcgggcagattgcccgcatacgcggtgatcggcaggtacagcaatgtggcgattgcatagagggtggcgagtttcccaagttgcgagcgaaacgacctgcttgcgaggatggagcccgcacgatgccgtccgagtacgaagaatcccgtggtggccaagaagaacggcacggcgatgcgcccgagcgtgtaggtgacgatatcgtcgagtgcggggtcgatcgaggcgaacggcgctgtatggatggcgatgacgagaaacgccgccaccattcggaagaggtcgatcgcctgataagcgcgacgctcaggcataggcgagcaggcgggcgtcggagggttcctgcgccgttgcgagcgcttcctcgattgcgatgttgagcacctcttcgagcgataggcctgccgccttgagcatcgaggggaagcggctgtgggcggtgaagccggggatcgtattggcctcgttgaagagcagtcggccatcgtttgcgaggaagaaatcgatgcgcgcgaaccctgtgcacccaagagcacggaacaggcgcatcgccgcacgcttcacgcgttgcgcatcgcgttcggctatgcgggcgggtacgatgatgttggctgtttcgcacgagtacttttcgatgtaatcgaacaccgtgccgttgagctctatctcatcgggttcccccacgatgagggtgcggcccgattcgagcaccgcgcagccgatttccgaaccgtcgatctctcgctcgaggatggcttccgaatcgtaggcgaaggcgtcggcgagggctcgggtcagggagtcgggcgattctacacggctgagccccatggaagacccttcgcgcgggggttttacgaacagggggtacccgattcgctgcgcaatgtggtgcatttcgagtttgttcatgctgatatcgacgagcgctccttcgggcacgctgatgccttcggctgtggcgatgcgatgggaaacggtcttgtccatgcagaccgccgatcccgtaacgccgcagccgacgatagggatgccggcaagctgcagggcgccctgcacgcttccgtcttcgccgttgcggccgtggaggatcggcagcgcggcatcgagacgcacgagcgaccccgtagagaggtcgatcaggccgcgcgcttcccgtccgaacggcagcgcaacgggcgtgcatcgcgctgtttcgagccaggagtcgttctcgatcgactgaacgtcgccatcgtagcgatgccaactgcccgaacggtcgattccgatggcaactacgtcgaaccgcccagggtcgatgttctgcataacggcggctgccgagtggagcgatacgggatactcgttcgagcatcctccgaacaagattccgatggtggccttcgttgcgcccatgttgttcctttcagggttgcggaaatgaaacgcgcaggtcgcgcgccttctcccagtgcgcgatccaaggctgaaacgactcgcttttcgcgctgccgaacctgtgtgcccgcgtgttcaggctaccctgaagcgtgcttaagagtctcgaaacaatcgtcaacgaaaaccttaaggagctttaaattattctgaagggcgcaggaggcggttctcgttgcgcagttgcgggtgaatcttcgcggtcttcgccgcgtgctgtttgctgctctcccttttgtcacgcgaccgtcaccgctttgataccgtgcgtcggttgatcgggagcttcgggttgctgatacttggaggcaactaaaagcgcttcgggcgcatgccccgagcgatgcagcacgtggaaggaagagatatggaagcagcacaccgcacgaatagggaaccgtcgatcgagcttggcgataccgagccggtcgatgccatcgagatggcggccgacgagctttcgaccggcgccggcgccgaagaaaccgagtctaagagagatgctcccaccgaccgcgagatcgacgaggccattgccgagctcgaggaccgtgcgcgggagatagaacggggcgccgagatcgacgaggcgatagtcgagctcgaagagcgtgcggaagagatttcgcgcggggacaacgccgatatccaattggaagtggaccccgactgctgctctccttcgcgcgaatagagaacaaaggcaaacgggcgtgttgcctcgactccgatcttggcatctttgaggtgtcggcgcgaaccagcgaagggctttcggggcttgtgggctggatcgaaacgaagctcctgttgagtcaaggcgtccagcaggaatcggttttcacggcgaagttggtgtagcgctggccatctgtcttgtatcgcgctgcgcatttggcagcccgacttcggcgctgcagcttttgtgtcccaatctgcgattttttgccgaaaagggccgatctgaagggatccgaccggcttcggggcttgtttcgcaaccctcgcggagcgtcgttgcgggtcgttgggacaattccggatttcccccattttgatcaggcctttcggtaggtacgaaaaggccttgggacaatggggtggaagctgcgggatccacgccttcagatcggcccttttcggcaaaaaatcgcagattgccttctaattatgggttttgcggtggcgatgactgggatgaatcgctagcgagctatcctgtcgggcagcttgagggcgcccctaccgcagttcctcgaccatctcgaccacgtcttcgcgtgcatgtacgtcgagcttggcgtagatgtggcggatgtggcttttcgcggttccgttcgatatgaccagcgtctcttcgacttccgcgatgcttttgtcctgagcgagcagtacgagcacctcctcttcgcgctgggtcaatccgaagcgatgcgctatgatagagcatttcccttgcagcgtttcgtagaattcttcgacggcgccgcttctcttgggcggcagcgggttgatgccccaagtgcttgtgaaatctctgtcggaaagaaacagcatagcgcacgcggcgatgagcacgatcgtgcagccgccgagaaccatcttgtcggcaaggcccatcgaggcgagccacgagtacccgtatgccgcaagggtgcttgcgagcacgcggaatgctcgggtgagtccgaagagccagatggctgttacgccgtaggtgtatgagatgttgctcagcacgatgagggtgaggatgacgaacccggaaaaccctgcgttgatgagcacattcccgactccgtcgagcccggtgaaaaacgagatgagcaaaaaaccggagatcatgagcgcgggcgtgatcttgtagagcatgcgggcgtcgaatcgatcgaacagaaacacgttgcagatcagcacgacggcggcgatgaacagcatgcccagcatgccgacatcgttcgaatcgaagctcatcgatctgctgagcgtagaggcgaacgcgtagacggcgagcagcaccgaaggtcgtatgggaaacgtccagtgcgaatcggcgctctccttcacctcttcgtcctggtcgggaagcagccgcagactcagcgaaaacatcgccatcgaaacgacgggcaatagtgcgactaccgtcatctgcatataggcgtcgagcagggcgactccgtagaacagcacggcggccagcatgaacgacgccgagtagaagatgctcgcctcgcgccgcggcaggctggcgtaaagctcgctccaaagcaggatcaaaagcgatgtgcccgatccgatgagcgcattgccgattatgaagaggggtagttcggctgcggctgcgagaggggcaagcgaagccaagatcgttccgaaaagcgaaaacgctcccgccgccaatgagaatccgcgcttggtggaaatgggggctattcttcgggcgaatacggcggcaaggataagacagacgaggttggcgaggttcgaaaggacgagcgagtcgagcgcccggtctgacgtttcgaagatgcctgtcgagaagtggatggtgaacagccaggcaaggtaaacgccgacgccgaggaatcgcagggggaacagattggctttgcccaaaagcggttctctatcggttgacgtgccgcccatggctcctcctctcgaatgcatcccgccgcgattatagcaagcgggggcgccttggttccgcgcggtttccagccgaatcacgcccgatcttttcttcgcctccctccgacgaggggaaacgtcgagggatgataaagatcatccctcaatatcccgtgatcacccgccttctcttctcgcgttccggtgctttcgccagcacaataaccgcgccgcagcagatcgggcgattgcctgtgctgcggccgacggaaacgggagggcggcgcgggccgccgaagagaaagggtttgtcatgggaagcaaacatagttcgcagttgagcaggcgcagctttctcgctttgggaggagcatctgccgcggcgattgcagcatcgtcgctgataggctgctccccgtccactgaagcacagggcgaggcggcgccgtctgccggcggagcttcgagcgggagcgcctacgccaacggccgggtgagcgcgcaggagctggaagtgtcgtcggttgtggccgatcccatcgaggagttttccgaagagctgaacttcgatgtcgttgtcgttggcgctgggacgactggcgtgcctgcggcgctcgccgcgcacgaggcgggggcgaaggtcgccgtgctgcagaaagaggcgaacccggttgcgcagggcatgctcgccgcacgcgtcgtcaaagaccaaagcaccgaggctggcatcgcggcctacattcatgaaatgcatgagttcaacgcccatcagcccgatatggctcttttgaaggaatttgccgacaagtcgcaggaggtgcttgaatggtacgaggacaggcttgctgagataggattcgatgcaagcaaggaaagcgattcgatggaccatgtgtacgaggacggaaactgctacgtgaagggccttctgtttcccgatagcatgcaggctccgacgacggcgctcgccgagcaggcggcaggcgaaggtgtcgaattcttctacaatacccccgcagtgcagcttgttgtcgaaaacggcgccgtgacgggcgttgtcggcaaagccgaagacggaacgtacaagaagttcgcggcgtcgaagggcgtgattttggcgacaggtgattttcagaacaacgacgccatgcttgaaaagtacgttcccgacgcgctcgtgttcaaccgcaagcagatcaacaagacgggcgacggccatctgatcggccttttggcgggagcagtcatggagcccggcggccacagcaagatgatccacggcggcaaagggtgttttcgcgaagagcccctgttggcggtcaacgtaaacggcgagcgcttcatgtacgaagacgttccgtacggcgcgcgcaacacgattctgcgcgatcagcccgagcaccgcatggtgaccatcttcgatgcgaactactccgatcagatatacgggtggggaagcgatccgacggtgccgaccgtcgcaaacggtacgcccgaaaagatcgccggattcgtagaggatggcacgcttctgcaggcggacagcatcgaggagctggcgaaggccgccgggcttccggttgatgcgaccgtcgcgaccgttgagcgctacaacgagctgtgcgagctgggggccgacctcgatttcgggaaggcatccaagtacatgcagcctgtcgatactccgccgttctacgcaatgccgcgcgagtacgccgtgtcggccatccccgcagggcttctgatcgacgtgagcggccagtgcaagaacgccgacggcgaacctatcgagggcttgttcgcggcgggcaactgctcgggcccgttttacggggcgatcgattactcgctttcgaccatgggtctttcggtcggacgctgcatagtgttcgggtacctgacgggcaagcacgtggctgagaaataggggctcgggaatcggtttcgttcaagcgaaaggcggacgggtgtgcagccgtccgcctttctgcgtttgtgcggagatttacggaacgggtgggcctccttttcaaggcatctgcctttcggtgaaaagcgaaacggtattgccagtcgacttgctacggccgtttcacacgctcgatgagctcctgtttccctgcgacgccgaacttctcgtatacatggcgggcatgggttttcacggtgctgtgcgacaacacgaactccttttctatggccggcaggctatatccctgtacgagcaattgaaacacatcgttctcacggggagtcaatccgtgctcttcggccaatgcggcaaagtgatcttcctgtcctttctcccatgaagggaactgcttcgcggcgaggcgctttgcgctgttgcggtagagcaaaagcgcaacagcgagggtatagacgattatcagaaccaatgcggtaagcgacagtgttccctggttgacctgcacttcgaagaaaaacgcgaggggagcagccaaaaggagaagcaggttgagcgccgtccacccgccgacgagcacgataaacgggtcggctttcttggagtttgcgatctcgggcaggatgagccatatcagtacgtaaaagaacgtccagcttgattcgacgagcgccacggcgatcgtcgcgaccattccctcgcggcccggcagaagaagcagtccgagcagggtaaggaagaacaaggggatgatcatctgctgggcgttcggcgcgaatcgaacgcgcgagaggtacagaagaagcaggatcatgccgccaatgcggattgccgccgccgcaacggattgtgccgtttcgtcgacagcggggaagttgaagaatacgagaatcctgaaaagcatggcatagctcgccatgagcacaatcaattcccatggaatggaagcaaggctgcggcgggcgtcgagcgcctttccttccgaggtctcttcggcgttatcgccgccatcttgcggcgtaaggaaaagcggcaggacactgccgcaggcgatggcgagaaagcatacggctctcatttcggggggcagcatgctcatggcggtgaagatgaacactgcaagaagcgccgcaaaggcgatggagcgatttcggtgggatttctcaagcgaggcgaggtattccgcccaacagaggagtatccacgcatgggctatcccaatcaagcattgcgcggcgaaatagaccggtaggctgtaggcgtagtagaaggtaagaatgaagccgataaggagcgctgctccgttggcggccagcatggtgcgcaatcggagaaagcgaaggccccgcaatgccagggcgagcgcaacgaagaggacggctaccgaaaggatccgggcgatccaaaggctgaaaacggggaacgcgttgatctccgcctcccataaagagtaagagggcgtctgccgaagaaggccgagcgttgcaagctggcagcagaaaaatagcggcaaggccgttgtttcaaaagcttttgatctggccttttccaccatctcgtccttttaggtcaatacgaaaacgtttccggattctccgattcaacccctttgggccgatgcccgatcacgctgtcgctgcaacgatgcaaatgacggcgatgccgtcgaatcggttaatgggaatactaccaaaggggatgatcttatgagcatcacacgaagaaattttctcaaaggcgccgccatcggcggtgtgggcatggcttcagcgggtttgcttgcgggctgcgccggtcaagcgagcggaagcggcgaggcttcgcgtgcggaggacgctcagccgtcgaaagccagtgtgctcggctcgatggagccggccgacgaaacgtttgaaggcgatgttgttgtactgggatgcggccctggcggaatagcgtgttccgcccggttggcggaaagcggagcgaaggttcatatcgtcgagaaaaccgaaaacatcggcgggacgggtatggtttgctcgggcaactgctacatttccctcaacagcgaataccagcttgaacaaggactcgaggccgatatcccggcgttttacaaggagtggctcgaagcggttcactaccattgcgatcatgaggtgctgagcacgtatctgcgcaattgcggccgtgtagtcgattggctgcgcggatacggttttgggttctacatgaaggaaactcccccgaccaatggactgtcgggcaacgagtatcgcatctcgcagccgccgaaagacgacgacaaccgaaaggaaacatacgggaagatggtcgaagtcgttaccgctgccgggggagccatgcatacgggatgcacgggccaggaactcattgtggacgacgccggcaccgttgtcggccttcgtgccgcacagggttcgaagaccatcgatttcatgggcaaggccgtcgtgctggcttcgggaggctacggtgcgaaccaggatatgatcaacgagctatgctcggtgcctttgctcgggcgcgatccggtgttgaacaatggcgaaggggctttgatggcgtgggcggccggcgcggcaaagccgtggaacctcggcattctctgctgcgatacgctctatcccatcgacgagaactacgtatcgtatccgggaggcgttcaggcgctgggcaacgttatgcaggaccccgcgaaaggtcgcatgcatgtcagccaattcggcaagcgtttccattcggaagatgcgttttgctgggttcccacgtacggcggcgcgaacggagtggcttgcgatgagccatggctgttcgtcatcgccgatcagtctgcgatcgatagcctgaaggaagccgatcccgatacggtcagcgatgcatatctggcatccatgaaagactccggcgtattgttcgagggcgctacccctgaagcgcttgcggaggctgtcgggtgggatcccgagacgttcgctgcagagttcgaggcgtatgccaagctgtgcgaggccggggaggatccggttttcttcaaggacgcccagtacctcgtgccgtatggtgatgggccgtactacgccgtgcgcatggcgcccacgccgttcggcacgtgcggggatttgagcgtgacgccgaagatgcaggtgaaagcctctgagcctgggcgaacggtgagcggactgtatgcggttggaaccgaatcggtgggaaccatgcacaacgactattactgggcgcttgggcagacggttggctgggcgcatacttcgggcgttctggccgccgaagagattgcggctagcgttttgtagcgcatcggaattctagcgcgcatatcatagcgccgggggcttgatgcggctcccggcgtgcgcttttagcggtgtccctcgaatcggttcgacaccgttctcttccgaggcggtctcggttcgttcatttttgccgcccatcatgtacaatgataatgtgaaacacgcacgggtgttctataatggcgaaaggcggcttcatggagacgcgctacttcgaatacggcgacgaagagcttgcttacctcaaggcgaaagacaagcgcctggccgaggtcatcgagcggatcggccccatcaagcgcgaagtgcatgtcgacgtgttcgagtctctgatcgactccatcgtttcgcagcagatatcgggcaaggcggctcagacggtatggggccgcatggtcgagggcctcggcgcgattacgcccgaaggcatcgcgtcggcttccatcgaagagctgcagaagttcggtatgacgttttcgaaggcgcgctacattcgcaatgcgggcgagaaggttgcggcaggcgcgctcgacctcgaggcgctgcacaccaaatccgacgaggaggtgtgccgcgacctctgcgctctcgacggcatcggcgtatggacggccgagatgctcatgatcttctcgctccagcgcaaggacgttttgagcttcggtgatctcggcattcagaaggggatgcgcatggtgcatcaccatcgaaggatcccgcgcgacctgttcgagaagtaccgccgccgttattcgccgtacaacagcatcgcgagcctgtacttctgggaggtcgcgggcggcgcgatcgaaagcatgaaagactacgcgccgaaggcgaagaagaagcaggcgaagggaatcgcgaaaacgcagtgagccgaccctgggcgtctgtccggatgctctggggtctgtgtgaatttggttgcttcggcggttgatgcgcaggcgcttgcggcgggttcgtctatactggtctggttcaagatcgagtatctcgaatgggctagggcggcgccaagttctgaacctggtcaggtccgggaggaagcagccataagggaccgctgacgagcgcccttgcctattcgggatacttgcatgttcgacgttgtacgcgcgatgcgataggttgcaatggaaatcatccagttcttcatcgacctgctccaagaccctcgtagcttcattgcggaatggatatcgagcctcggtccccttggtgcatacggccccatcttcctcatcatcttcatcgagaccggcgtggtcatcatgccgtttctgccgggtgattcgcttctgttcacggcaggcttcttcgctgccgacgggcaagggctgaacctggccattctgctgcccgtggtgtgggtggccgccatcgtcggcgaccagtgcaactactggatcggccgcgagttcggcaggcgcatcatcgattcggggcgcgtcaaatcgatgactcctgaacgcatcgagaagacagaggccatgctcgacaaatacggtccgcttgccatcttcctcggcagattcttcccgttcatccgcacgttcgtaccgtttttcgccggtatgggacgcatgcattacaagaaattcttcctcttcaacgtgctcggcggcatcgtctggtcgtcggtgttcacgctgctcggttactttttcggaggcattcccgtcgtgcaggagcacttcgagctcgtgatcgtggcgatcgtgctcatctcgcttatccccgcagtcggcggcgtgctcaaggcgaagttcggaaagaagcgataacatggcagaggcactgtacaggaaataccgcccccagatcttcgaggatgtggtggggcaggagcatatcgagcgcacgatcaaaaacgcgatcgaacaggacaaggtcagtcatgcgtatctgttcaccggaccgcgcggtacgggcaaaacaactacggcgcgcctgcttgccaaagcgcttctgtgcgagaaggggccgacggctgagccggacggcacctgcacgaactgcacggaaatcgccaacggcacgcatcctgacgtctacgagctcgacgcggcgagccgcacgggcgtcgagaacgttcgcgaggagatcataggacgcgtgcagttcgcgccgacccgcgggcgcagcaaggtttacatcatcgacgaggtccacatgctctcgacggccgcgttcaacgctcttttgaagacgctcgaggagccgccgtcgcacgtcgtgttcatcttgtgcacgactgatccgcagaaggttcccgaaaccatccattcgcgctgtcagcgcttcgattttcgccgcatttcctccgaggccatcgtatcgcgtctcggcgccatctgcgtggccgaggatgtagaattcgaaggcgatgcgctcgatctcatcgcgtaccgtgccgaaggcgggatgcgcaacgcgctcacttcgctcgagcaggtcatcgcgttcggcgaaggcaaggttacgctcgagaatgccgagcgcttgctcggatcgctcgataccaacgacatggcggagatcgtccgcttcgtgggtgcgcgcgatatcgcatcgtgctttacgtggacggccgaatacatcgaaacgggtgcggatctggcgcagtttacccgcgatttaaccgaacacattcgcaacatgtacgtgctcgcgcttgcgggcgccgatacggcgctcgaggtgagcgaagcgacccgtcgggaactcgtcagcgagatggaattgttcgggcccgaccgtctggcgaggctgctcggcgttctcggcgatctgtccgccgagctcaagacgtcgaccaatccgcgcctttccttcgagattgcgctcacgcgcatggttcgtcccgactccgatcttacgctcgagtcgctagccgagcgcatcgaggcgctcgaatcgggctattccgcagttgcgcatgtcgtctcgtcgtctgccccggctcaagccgctgccgcaccgtcggcgcctgcggttcagcaggttgcggcgagcgccgctcgcattgcgcaaccgcagcagcaggctcccgagcaggctgccgcgtcagcccggcctgctgccatccccgcagcggccgagcccgcttccgcgttcgaccctgctggcgacgaatcggctgccgcttctgcgcctgtggccgaggcttccggggaaagccgaggcgctccggcaagcggtctcgataaccctgcggccctgcaacgaatctggcaggcggcgctttcttccatcaaaaaggccaaagccgcctacggcgtgcttttcctcaatacgaaagccgtgtacgacgccgagagcggcggtatcatcatcgagttccagaccgagaacgcctttgcgtacaacgccgtgcagaagccggaagtgttcgaggtggtgaaagcggcgctcgaccaggcggcgggcaccgaggttccgttccgctatgcacagggcaagggcgcagccgctgcgcctggcgctgcgcaggcgagcgctcctcagccgtcggcttcgtcgagcgtgcagcccgtcacatccgcaagccatcagcagccgcggccttcggcgggtcaagccagcgcggcggcggtcgctcccgccgtccccgttgcggcgaaaagcgccgctgcgtccccgtcggcatacggtgcgcccgaacccgatctgcccccgatcgatgcctacgacgacgtgtacgttgcccctgatgcggatgacgcgcctgtggcggcagccttttcgccggcgtcttcggcatctccagcgtccggttcgacatctgccgcgccccaaccggcgcagccctcttcgcctcccgtgcaagaggctgttccgaagcagggcggcgcgtctgcgggggagggcgatatagaatcgattctcgcggcgggattcggcgaggggttcaccatcgaggaagttgattagcccggctcgcgcggcggagccggtggcaagcgataacgacgaaggagtaccgcaatggatatgaagaagatgatgaagcaggctcagaagatgcagatggagcttgcccgtgcgcaggacgagatcaaggatatgaccttcgaggccactgccggaggcggcatggtgaaggccgtggcgctcggcgacatgacgatcaagagcatcgaaatcgacaaagatgccgtcgatcccgaggatgtcgaaatgctcgaggatatggttctcgctgcggtgaacgaagcgctgcggggagtcggcgaggcaagttcgtctcgcttgaattccatcacgggcggcatgaacatccccggcttgatgtagggaaacgcgtcgtgaacgctgcgccgtccatacagaagctgcttgacgaactcgagcgactgccgggcgttggcccgaagtcggcgcagcgcatcgcgtattggattctcaacaccgataaggcgacggccatgcggttgtcggaggcgatcgccgaggtgaaggaaaccgtccgattctgctcccgctgcttcaactacgccgaggacgaactctgcgagatctgcgcttcgccaaagcgcgatcaggcgataatctgcgtggtaagcgagccgcgcgatattccgcccatcgagcgcacggcggcgttttcgggcacctatcacgttctgggcggtgcgctttcccccatggaggggatcggccccgacgatctccatatcgctccgctgctttcgcgattggcgtccgaagaagtgggcgaagtgctgcttgccaccaatcccaacgttgagggcgagacgacggcgacgtacctcgctcgcctcatcaagccgatgggcatcaaggtcacgcgtcttgcgagcggcctgcccgttggcggcgacctcgagttcgccgacgaggtgaccctcggccgcgccatcgaaagcaggcgcacgctgtaagtgcgcgacgatctgcgagttgtttttcggcagcctctattcgaaggcacgttgccgcttgactgcacgctgacttaagctcatgaaggtgctctgcgtattcgctgcaccttgctgcgttgcggcgatttgcgcccgaacgagcttccgggccggctcgaccgcatcggcgtagctttcggagaacgtgacgagatagcagcttgcaagcggatcgtgttcgtaagccatagccttgccgtgtctctcctcaaaacacacgccgatctgccgattttcgccgaaaaacaccgatctgaaggcgcgtgcctgcaagctggcgccaagcttggtcgcaaccttggaaagggccaggtcaaaggcttgtgcgatagtcgccttaagcggtgcttcctcggtgagcctcgccagcgtatccaggtgaggaaaatctcttcagatcggttcttttcggcagaaatatcgattttggttcacgaaaaaggtgaaccctcatgctggtcggtctgccggatggcggattttctggccgcggggtgcgccgcagggcggttgcctggttgcttgacgcatcgcaaggcgcgtcccccgattgtctggcacgttacggggtgagtcgtctggtcgtttggcgcatcacggggcgggttgccttcgtttgcctgggcggcggactcccgctgctgaccacggcgacgttcgggcaataaaacgggcggtgaatgctcaccgcccctgaaagcgtttcggcaaagatgaaagatcctgccccctccaaaaaacagaatccttatctttgccgaaactcgttgaagtgtttccttcattaacgcagccgttattatacaacgtttgccacaagaacaatagacttttttcaactttaggtaaagcacctggtgaaatagttgaacagggtctctctatcgttgaagaagcgatcggagtggccttcgggtgtctttctggacggcgtgttcgccgtttgggtttgcgcgggaaaagacgggttcgggtacaggtatttgcggttcggactcttgccgatagaggtgctgatggccgtttgcgtgggagcttctgaaaacgctaggtcaagagttcggctttggaagcatcctcttgggggagggttgcttgttgcgcgattcggctttcgcaggcattttcggcgcccaatccgcaattttctgtctcgagatcaaggcttttctgcgcggaacggattgtcggcaatagcctgcgcccaaagcgatgcgggcgcggcttacgtgaggaatggcgcagttcgcgttgggctggtggtgcgggttgtgcccagggtgcgcgcggcttggtgggaggttggaacgaggggcctgcgcgccgttgatttcgtatcgaaatggctgctcgtgagaaaaaaatgctgtctgggtacagattatttcggttttgtacgctcttttcgctcgggctgttctgctttttaccgtcgaggaaaagggtaaatcggtaaggtcggaagggtacctggtcgatgggtttcctgtcagcatgtttgcgattctcagggcggagcggtaggccccgagcatgcaaaaccgaaataatctgcaccaaggtcgtcttttttctcacgaacgggatggtggcaggctgacgttcgcttatgcaggcgagccggaggtggccgggcgcttcggttgcgcgggcggtttgccgggcatcggttgctggaatgacctgccggtagctgagtgtctggttgtgcgaatggcctgcctccgtctggatgcttgctcggggatgatttggcaatgctggcgcttgattgccaagcggcgttggccggccgtttggaccaaagcgctgtggtaagctttatcccatgaagatgaaaaacgacatacggtctgcaggcgcttccgatggcgacttcggacatgttgtcgcgggcgattcgggcaacggcgctacgggcgttggtggggatgctgcgggtgacgctgtcgatggcggcatgggcgagggtgcgtctcgcgccggtcgtttccggcgcgcacgcatcgtcagctgggcgcttgtcgtcctctgggcgggcctcatcttcctcatgtcggcgaatacgggatcaaacctcagcaacgacctgggatttttctcgagtatctaccaagcgctcaaagacgtgcaggcgcagttgctcggccccgatgccgacgccatcaactcgatcgctcatttctgcgagtacgccgtcttcggcgcgctgcttgcaaacgcgctgcggttccatatgccgctgcgtcgcgcgtgcatcgtggcgctggtttgcgcgagcgcctatggggcaaccgacgaattccaccagtacttcgtgccggagcgcatgtgcgatcctgtcgactgggcggtggacacgctcggcgccgcgctcggttcggcgttggcgttcgcggtgcttcgcaaacggagctagaccttcgcctgcgtcggcggcccgacgcttcgccggcgtcgacgacatttgggcgaccgtccgaatgccgtgcgccttgcttgctcgatgcccccgggggggggcgattcctgcgcgacgcgtctgcggtctgtcgagaagatgggcgagcgcgcattctcattgacgaatcgcccgcgctcgcgtagcgttcggggtatcggatttcgaaccacttcgagcgaaagaggctgccatgatcaatcgtttttgcaagcatcaactgtgggaagtcgcgccgacgctttcggcggtcgcgcagggcatccaacctgctgaaacggttatcaagaacgcaaagctcatcaacgtgtgcacagctgagatccaggagggcatagatgttgccattgccaaggggcgcattgcctacgtgggcgaaaacgccgatcactgcatcggcgacgagacgacggtgatcaaggccgatgggtcctatatcgcccccggcttcttggacgggcacattcacgtggagtcttcgatgctcggcgtggccgagtatgcgcgcgcaacggtggcgcacggcacgacgggcatctacatggacccgcacgaaatctgcaacgtgctcgggctcgatggcgtaaggatcatggacgaggatgcgcgccgcgttcctctgaaaacgatgataaccaccccttcgtgcgtgcctgccgtgcctgggttcgaggataccggctcggccatcggtcccgatgacatcgctgaaaccatgacgtgggatagcgtcgtcggcctcggtgagatgatgaacttcccgggcattctttcgggctccgagcacgcgcacggcgaagtggccgaaacgcttaaggcgggttattccgtcacgggccactattcgcttcccgaaaccgatcgcggcttgaacgcttacattgcatccggcatctgctgctgccatgaatcgacgcgcgcggaagatgcgctcgagaagatgcgtcgcggcatgtacgcgatgatgcgcgagggaagcgcctggcacgatcttgccgcactcgcccccgtggtagccgaaggcaagatcgacagccgtttcgccgtgctcgtatctgacgacaaccatcccaacacgcttgttgagaagggtcatctcgactacttgatcaggcgtgcgatggaggagggtatcgatgccgttaccgccatccagatgtgcaccatcaactgtgcgacctgcttcaagatgaacgacgatttgggcagcatcgcgccgggcaagtgcgccgacatcgtgtttctcaaggacctcgatagcatagaggttgcccgcgtgctgatcgatggcgaagtggtggccgagaacggacgggttctgtttgcgcccgagccattcgagtaccctgagtgggcggtgcactccgtccatgtcaaagacgccatcacgtccgcttcgttcgccatcgccccgcaggggcttgctgccgatgcggccgaggcgaaggtgcgcgtgatcggcgttatgggcggccgcgtcgacgatgaggagcgccacctaacggttcccacgcacgacggcctcatcgagagcgacgtcgaggcggacatcctcaagacgttcgtgttcgaacgccaccacgagacgggcacgttcggctacggcctcacccaggggttcggcatcaagcggggcgcaatggcttcgaccgtcgcgcacgacgcgcacaacctgctcgtggtcggcacgaacgacgaggatatggcgatggccgccaataccctgatcgaatccgacggcggcatggtcgttgtggcggatggcgaagtgctcggtcacgtgccgttgccggttgcgggcctcatgagcgaaaagcccgccgaagaggtgagcgcgcttgtcggccgtctcgaagaggcgtgggccgaaatcggatgcaccatgccctcgccgttcatgacgatggcgctcatcccgcttgcgtgcctgcccgatctgcgcctgacgaaccggggccttgtcgactgcaatacgttctcgttcgtagatctgctggtagaggagtagctcggctgccgtgcgcgggcgccctggggcgcccgcgcaagccgaggagcccgatcgaaagagcaactctgttcctatgcgagacgcccttcctttgcgagcaagaccctgcggggcctgcttcagacgagtgcgcttccgtaagcgcacgataaggcgcgtgcgggggcttctgcgaaacaaccgcgctgcatactgaacgaaggcggatcgacatcccgatccgccttcgctttcttgcgagacgaaaccttccatcacaggcaatccataagaacttcaaaattacccatgctgtgacctggggcaatatctacaattatcaccgctacagtaggatttgtggagtcggccgatccactatgtaataaaataccgaattcgagtacactgagtgaccttgaataggtaataagtttatcaattatgcaggtgcccctttgcaaacgatggttgcgggcatcgtggaagcgatagatagggtggcggtggccgagacgagcaaaaagcccaacaagctcttgctggagatcttgtatctggtgatcaaaatcgccgttgtggttctgctgttcgcgctggcgttcaccttcgcgttcggtatagagaaggtggaggacaactcgatggctccgtctttcaaggggggcgatctggctctgttctcccgtttcgatgattcctttgtttcaagcgacgtcgtcgtcatcgactacgaaggcgatgcccagctgcgccgcgtcgtcgccgtggcgggagataccgtcgacatcacaagcgatggcctggtggtcaacggcgccctccagcaggagcagaacgtccacacggacacgctgctctacgaagggggagtgacgcttccccttaccctcaaggaaaacgaggtgttcgtcttgggcgataaccgtctcgagtctctcgatagtcgcatgtacggtccggtcgatacaagcatcattgccggtaaagccatattcgttggaagaacgaaaaatctatgaggaaaggtgaaggcatggaaactgcaagaaagaagaacggggtaatcgctatcgcgatggcggccctgctgtcgctcgggctgctgctcggcggcgtatcgagcgcgtttgcggccgatatcccgaaagacggcggcagctcaagcgagacgatcacgggggtgttcggctccggggcgaccataaccaaaaagctgatgatcgctcctaacgtcgaggcgccggatgcgggattcgcgttcgatgtggcgctgaaaagcgtgtccgatcatgccgatagcgaggtttcgaccaacgctgcgtacgattcggtgcgctcgtggtcgaccgctgcggtcaacttcgccgggatgaaaaacaccaccggcgatagcatgatgaagcagacgtccgccaacatccccgctgcaactgcgtttccgcatgccggcgtgtacacctaccaggtgaccgagaaggcggtaagcgcattgggagtgaccagctcgggcgaaaactacacgatgaacgtatacgtgaaaaacggcgcatccaccctcgaggtgtatgcagtgaccgtcatcctgacatcggatatcggcgacgacaacaagaaggtcgatcccgagcccggcgacgacaacggctttatcttcgttaacagctatacgccgacgaccacgctgtcggttcagaaaaccaccgacggcgatttcgcggataggacgctctcgttcggatacaccgtaacgatcacgaccccctcgaacactccggcgaattccgagatccgctacatcaaaaacggcgatccggccgacagcggtgcgacggtggagcccataggtccgggtgctaccaccaagacggtgacgatggacctcaagcacgaagatgcgatcaacttctccggccttcccgccggcaccgtctacaccgtgaccgaggcgcagaacccgaactaccggcttacggcgagcgttaccgagggcggtacgggagcgagcaacgtgacggttgaaagcggcagcgtaaccgttggcgactcccgtcccgtttcgaccaaccttgttgccaccaccggcaccggcgagaagccgaacgtcaccgccgtgacgggtacgtaccgtgcgatcgagattaccggacttgtcaccgagaacctgccgttcatcctcatcggcgcagcggctatcggaggcttggcgttcttcttggtcagccgcgtccgtcgtgcgaacgaagaagactaaccgccaaaaatccgtccgagcgatcgtcggaaagcgaagcagaacgctatgagcagtaaaaacgatacaagcagcgcgatcggccttaaggccatccgcactctggacaagatcgtggacaacgccttgctggtcgcgctcgtcatcgtcttgctcttcagcgtctacatcgtatacgacaacaggcagacggtgcagaccgcgagtgcgtcgagcttcgagcagtaccggccgagcgaagaagagtcatttgccgggctcgtcagcgaaaacgacgaagtgttcggatgggtgagcgtatacggaacgggcatcgactacccgatcgcccaaggcgagaacaactacaagtacgtgagcaccgacgtgcgcaacaagccgtcgcttgcggggagcattttcctcgacgcgaagaacgatcgggcgtttaccgatttcaacagcatcatctacgggcaccacatggcggaaagcgccatgttcggcgacatcgacaagttcggtgcaaccgagtacttggaagaacatgcctacggcgagctgtacacggcggttaccgacacctattacggcgtcgaattcttcgcctacgtcatgggcgacgcctatgattggaagctgtacgatccggcaatcgcgggcgaggccgaagcgcaggcgtatatggactacctcgattcgattgcggtcgcatcccgcgatgtggatgtgtcggcgagcgacaggatcgtgcttttgagcacgtgcgcgtcggagccgacgaacggaaggcacgtgatcgtcggcaagctgacagacgagcggttcgaaaacacgttcggaaccgagcgggcggaccaaagcgggctcgcaaggatcgatgcgctgagcaacgtttcgctgatcgtcgtctccctgatcgtgatagtgcttgcctcggtactggtatacgtgctcaaaagaaggaaggatgcaattacggctccatgatgcggttcggcgtccataggcaacacggcaggaagcgcatcgctgcgcttgcggcgtcgtgcgtcgtcgtcgcggtggcgctgctgggctttccgccacactcgtttgccgatgccgatcgaacgggagcgctcgagctgacggtgtcccaggaggtgagggcgcgcgcagccgatgcagacgtaacggtgcgctatgagctccgtgcggacgatccgggctcgcccatgcccgactcatcgccggcatacgggttttcgctaacgaacgaccagacgctggttcttcctgcgattcggtttcagtcaacgggcacttacacgtatgcgcttgacgcgatctcggctgcaggcggggcttcgggcgtcgaactcgacgcgaatcgctatacgatagcggttcacgtcgtcgatcacgggatcatcggcgtcgagatgcagccgatcttcaaagacgccgacgggtacaagaccgcatcccttcgtttcgcgcacactgcaccggcggcaccggtcgacccggctgatccgatcggtccggaaggcccggcgagcccgggcgacccgatcggctcaattggaatcggatcgttcgcgccgaaaacgggagaccagatcgtcgctgcttcgttgctgttgcttttattgctggcggcggcagcggtggcggcatcggaagtccatcgcaggagaaagcgaggtgagagccatggcgacagcgtgcaacattaggaaagcggcagtgcggtttttggcggtcgtgctctccgcgtgccttctgacgctgagcgttcccttcacgggtgtggcggagaattcggtggcttcgtcgatggcgatcggctcttttgcggctcaaacggcaagcggccaaggagaagccggcgaaccgctggatcccgagggcgaaacggcggctcccgtcggtgatgagtcggaaggcaccgaccccgaaatcgaccctgagatgcctgaggtgcccgagacggctgagacgcctgagacgcctgaagaacccgaggcggttccccagggcgatatcataccgcttgccgccgtatcggtgggaacctaccaagaactggtgaacgccatctactccgccaccaccgtagacattaccgtgaccaaaaacatcgtactcgaaaacaccttgtggatttcggggcggaccgtcagcatcaccagcgcgcccggcgttaccctgtccttgggcaacgcaagccccttcaacgccacgccctccgattcaagcgttggccgccacttcggcgtcaacgaagcgggaagcctgaccattgccaatctcgtcttagacggcacgggggcaaagggcaacgcggggggcatctacaccgctgacggcgcaacgctcagcttgacgaacgtcacggttaaaaattgcgccagcaacgccgaaggcgggtccatccgtgcggacggatcaaccgttaccttgactaattcgacgatcaccaacagtgccagcaaggcttcggctggcggaggcatctgggcgcagaacaccgcgctgaacctgatcggtgccaccatcagctacgctacggctgcgcagaacggcggaggcatctgggctttcggcggcacgacgcgtctgggcggctctcttgccagcactgtagccaactgcacctccggtggaaacggcggcggcatcggagtgcagaacggcaaggtcacgttagacagctctccgggaagctccgtcctcgataccagcgcggcaaactacggcggggggatattcgccgactggagcggcagtaccgttgtcgtggcctccggctctcgaatcgacggcggcaaggcgcctcatggcggaggcatctttgcgggcgatgcgaaaatcgaactctcaggctcgatttccaacagccattccggatacggtggatggggcggaaacggcgggggcatctacctcggcggctttgccggcttgaagatgtcgggtggagcctctatcgccggttgctctgccggcatcaacggcaactccgataacggcgatgcgggcatgggcggtgcgatctacctgcagtcgacggcgagtgccagcatcgcgaacgcgacgctttcgaacaacgtcgccacgtactacggcggagccgtcttcactaccaactacagtggtctttcaacggatgcaacggtattgttctcgggcaacacggcgcgcttccaccgcgttcccgccgacaccgtcatcgacgatcggggcgtctacccctgcacgaccgcgggggcgatatcggtttccggcggcgatttcgatggcaggatgtcgccgctcaacaactacgacatcagctacttcagctacaaggtgacctacaagccgaacggcgcaacgaacacgtccgacgcctactcggtccataccgaaatacccttttcgtatctgaacgagtctggtgcgaaggtgtacacgatgctcgacaacccgaactcgaagttcaccttcgagaaagaaggctcgaagttcgcgctctgggcgaacgccgaagtgtatgcgccggtggcgggggcgggatggttcacggcgcttgagcccggcgacggcatcgagctgtacagttgggatttcaagtccgatacctaccccgagcgggtgtacagcgccttgtggcaaaaggagatcgtcgttaccagccaggtggccggcgacttcgtcgacaagacgaagaagtataccgtcacggtgtcgtcgcacgaagtgtggacggccgaggggcaaccgcctgcgcttatcagctcgcaaacctacacgctcgacggcgggcagtcatcgggcgtgttcacgttttacgacgattcgacggttacgatagaggaggacgtgtcctcgctttcaagcaactacaccatctcccaccggcttgacagcaagccggcagaggagggctcaatctggagcgggaagatcgcgggggttcctgctgacggttccttcccgatacggcatgcgttcacgtttgcaaacgagtatcgaaaccctccggtaaccggtgtcgaagacgagtttccggctctggcgttcgcgctcggcgccggcgtgctgatcgccctcgtggcaggcgcgtcctatctgagaaagcggtttcgagactgagcggcacgctgtgttcgaaaacacgctgcgccgctcttgcaaaagggttctctgccgggctcgcaatggtatactctccctgaacgaagaggaaggcatggccatggctgtagaggtaccgagtcccgccgtatcgatcgtagggcggcacaattccggaaagaccacgctcatcgagcgggttatcgccgagctcgtcgcgcgcgggcatgacgtgggcagcgtgaagcaccacagccacgtcggcttcgacatcgattatccgggcaaggattcctatcgccatcgagctgccggtgcttccgagacggtcatcgcggctcccggccaaatggcgcgcatcaagaccgtcgaaggcgaggtggagtgcgacgagatcctgcgcaccatgcccggtcacgatatcgtcattgtcgaggggtaccgcaaaagcggccttcccaccatcgagatcatgcgctcgggcaacgatgccgatgcgcgcgtagcccaggtgttcgccgagggcgcacgtctcggctggccgctcggcaccgatttcacgcagatgacgcgcggtatggtgccggtcgacgagcacgacggcgacgagattcccatgcacggcgagggcgacaaccccgttacggagcattttccgacccaggcgccggactacgatgacatatccaacaagctgccgatggccggtacggaggccatcgtaaccgatatccccgatgccgcggaggctgcgaaaatctatggcattcccgccttcgccctcgacgatgttgcgggtttggccgaattcatcgagatgacctatgttcggccccgactgaccgttgtcatccaggctggtggcgaaagccgccgcatgggccgcagcaaggcgacggtcccgtttttgggtcgtccgctgatctgccgtttggtcgagcggctgggacccgtagccgacgatctgatcatcactacgaacgagcccgacaatctggtgtttctccatagcgagtttcccgatctgcgcattcagctcgtatgcgatgcagccgactatcgcggtgcgctgcccggcctctacacggctttgcaggcagcgcgcaacccctacgttgccatcgtggcttgcgatatggtgttcgcttctgccgcgcttgtcgttgccgaagcgctggagatgaagcgcaccggagccgacgtggtggttcctgcgaacaagcacggctacgagccgttccatgccatgtacaaccgcatgggatgtttgcccgccgtgcgcaaagccctctcgcgcggcgaccgtcgtgctcaatctttcttcgacgacgtgaacgtgcaggagcttccgcagtcgaaggttttggaagtcgagcctatgggaggctgcttcgtgaacgtcaacacgcccgaagagcttgccgccgttgaggcgacgctctcggaaaaggaatagagtctgcatgcccaatctgaacgatatcgtagaaatagccgaatcgcttgaaagcaaggcggtgttcgcggctgaagagcggtgcgttgtggtgcgcaaccgcaacgcgaagtgccgcaagtgcgttgaggcatgccaggcaggggcgctcgaagtcggcaataaccgcctgacctaccatgcgcgcgcctgcgtttcatgcggagcctgcacggtggtctgtccgaccgaagcgctcattccgatgaggccgcttgacgaggacctggctacggcgatcacgcaagcctgcgtgcttgccgatggcatggcggtgttttcgtgcgctcgcgccgcgtccaagcgcaaggccgatcccgatcggtttgccgaggtgccctgtttggcgcgcatggaggagagcgtgctcatgaagcttgcctcgtgcggggtttcgcgcctcgtgcttgtggatggcacttgcaaaacctgcaaataccgcgcatgcaatcccggcatcgacgcgacggtcgcttctgtcaacgggctgctcgaggccgagggcatcgagcttcgcgtggagcgcatgtcggaataccccgaagagcttctcgtcgaggagacgacggggttgttcggcgtatcgcggagggggtttttcacgcaggcgaaggatgtggcgaaggatgcggccgaaaaagccgcggtcacggcgctcaagaaagagctcgagaagaaggcgccctcgctgcgcgatcggctcaagatgtcagataagggatcgcttccgcagttcaacgctgtgcgacgcatgcgcgtgctcgattcgatggattccatcggcatgccgatcgtgcccgagatcgaaacgcggctctggggcaatgtcgagatagacgacgaaaaatgctcgtcgtgcttcatgtgcacgacgttctgcccgaccggagcgctcaggaaaagcgagttcgaggccgaggatggaaaaacgcgctacctcgagttctcggcggctgattgcgtgcagtgccgcatgtgcgaggacatctgcctcaaatcgtgcattacggtttccgacgtggtctcgaccgaggagctgttcgacttcgagccgcgcatgatcgaactgcccgaaccgccgaagaaggcgggtatcatctcgaacctcaagcggcgctaggacggggcggtgtcggttgttgcccttgcgctggaatcaaggtggaattgccgattgcgacggttccgcacgcgtgttgatcggtcggcttgcgtcgcatgtgcggacaaaagcctaaagaaggaggatcgatggaagccgagcagggccttgacggctccatgctgcaattgcaggtaaaggattcggagcggaagggttttttctcgatcgcgcccgtgcccatcggcaacatgttcagcgcttcggctttgcttgtgggggcgacgctcggggcggggctttcccttgccgatagcctgctcgccatcgtattcggcttcggtttcgtgatgtgctacatgtgtctggtggtcgtggaggctgccgatacggggcttcctacggcggcatttgcgggcgccgcactcggcaaggcgggcgcgcgctacctcgttgcgatcatcgtgggcgtcgcgtgccttggctggttcggcatccaggcggccgtgtgcggcgcttccttctcgcttatgatgaacgatctggcaggtatcgacgtgcccgtctgggtttcgacggttttctggggcgccgtcatggtggtgacggcggtttacggattcaacggcttgcgctacctcggctacgttgccgccccgctgcttgcgatcatctgcctgtacggcacggttgcttcggcgtcttcggggcaggggatcgagtatctgctttcgtacgttcctgcgcccgatgccgctatcggccttgttgcgggcgtgaatttcgccatcgggctcatcgccatgctgggcacgacggcgggcgacttcatcaggtatgcgcgagatcgcaaaaccgccgtgctcacgtgccttgcagggcttcttcctgcgggcatcgtggttctcatgatgggcgcggtcatgtcgatttccacgggggaggcgaacatcgccgtcatcatggcgtcgttcgggctgcccgccgtagggcttgtcgcgctcgtgctttccacctggacggtcaacgcgagcaacgtgtactcggcggggctcggtttttcggtcatgctcggccgcgaaaccgataaccgcaaatcaaccacggcggttgcggggcttatcggcatcgcgttcgcagccgcgggcatcctcgatcacctcacggtttttctcaacgttctttcggcttgcgcgcccgcccttgcgggtgcgatgatcgccgattactggatcgtcaatcgcggcgacaagagccgcttttgcattcggccgggctttcgggcttgcggcatcgcagcttttgcggccggtacgctagcggcgctcgtcacgggcggcacgttcgggatgattccggcgcttgcgtttctcgacgtgccgtttttcatcggacccgtgaacgggatactcgtgtcgattgccgtgttcgtagccgttcggcgactggtagaggtaagatagagcccgattgccgcaagacggttcggttgcgcggaaaaccggtgcaagaagccgagttgctcggggcttcgcgaatggcgtttgggcggttcgcacgcagaaggtggacggttcccgattgttcgggacgttattcctgaaaggattgcatatgagagagctgggcatacaggaaatcgaagacatcgccctcggtgcggcgctgctcggtgcgggcgggggaggcgatccctatatcgggaagctcaccgcgatcggggcggtgaaggaatgcgggccggtgaaaatgatcggcatcgacgaggttcccgacggcgccttcatcatgccggcggcttccatgggcgctccgtccatccttgcggagaagggcgtgggcgcaaacgaattcgcgcagcttttcgatatgatctcgcggttctacggcaaggaaatctacgcgacgatgccgatagaagccggcggcgtgaattccatgctgccgattgcggccgcggcgcgcctcggcattccgatggtcgatgtcgacggcatggggcgtgcgtttcccgagctgcagatggtcacctttaccatcggcggtgcgtcggcgacgccgatggcgtggatcgacgagaagggcaattcgggcattctgtccaccattacgaacaagtggaccgaaaacatcgcacgctcggtgaccaccgaatgcggcggtacgatcacgatctcgctgttctgcatggatgccgaaacgctgcgcaagtacggcgtgcacggaatcgtaacgcgctccgaagagatcggccgcgccatcaggcttgcgaaagacaacgcgggcgataagacccctgaagagtacttcctcgatttcgttggcgggcatcgtctgttcaaggggaagatatccgatgtgctgcgcgaggtgcgcggatcgttcaacttcggcaaggtcgtgcttgagggcatcggggaatacaagggcggcgaagcgcacgtcgaattccagaacgagaacctgtgcgcggtggtcgatggcgagatacttgccacgacgcccgatctcatttgcctggtagataccgaaacgttcagacccgtgccgacagacgcgctcaaatacggcaagcgcgtgctggtcgtcggcctcgaatgcttccatctgtggagaacccaagaggggcttgatctggtgggtccgcgctacttcggcatcgacaccgattacattccgatcgaagaacgctgcaagggcggcagattcgccgtcgatgcagctgcttcggggaaggaggccggcaatgtataaactcggcatcgatgtcggcggcacgaataccgacgccgtcctgatcgacgaagacctctccatcgtcgcggccgtgaagcatcccacctccgtcgacatcacgcagggcatcatgggcgccatggacgccgtgctcgaagcgagcggtatcgaccgttctcagatcagccaggccatgctcggcacgacgcaatgcacgaacgcgatcgtcgagcggaagggcttggcccctatcgcggtgctgcgcatcggcgccccggctacggtgggcattcccccgatggtcgattgggccgatgacattcgcgcggtcagcgttgccgagaccatcatcgagggcggcttcgaatacgacggcaagcgcttggccgaattcgacgaggcggcatgccgtgcgtttttcgagggcgtcaagggcagggtggaagccgtggctatttcgtgcgtgttctcgaccgtgcgcaacgatgacgagctttcggccgcacgcattgcaaccgaggtcctgggcgatggcgtgcatgtttctatttcaagcgaaatcggctcgatgggcctgatcgagcgcgagaatgcgactattctgaacgcagcgctctacgatgttgccagacggttcaccgagggttttgcggaaagccttgccgacaagggcgtgaccaacgccgatgtgtatctttcgcaaaacgacggtacgcttatgaccatggagtacgcgcgtcgctatcccatattcaccatcgcctgcggaccgacgaactccattcggggagcaagctatctttctcatatggatgacgccatcatcatcgacgtgggcgggacgaccaccgatcttggcgtgcttgcacatgggtttccgcgcgagagcggcgtagcggtgacgatcggtggcgtgcgcacgaatttccgtatgcccgatgtcgtgtcgatcggccttggcggcggttcgatcgtacgcgagcgcgaagacggcaccgtgacggtcggacccgattcggtgggctatgccatcacggagcgcgctcttgtgttcgggggcgatacgatgtgtgcaaccgatattgccgtgcggctcggcatggccgaagtgggggacgcctcgcttgtcgcgggcatttccgatgagcttgctgaaaaggcgatggctgcgatgcgtgagctggtggaagagggcatcgacgtcatgaaggtttcgaacgacgatatcgacgtcgttctggtcggcggcggctcgatcatcctgccgaccgatctgacgggtacgtcgaaggtcgtcaagcccgagcactcgggatgcgcgaacgccatcggctccgcgatttcgaaagtgagcggaacctatgaagcgctcgttgattacgacgaggtgccgcgtgaggaggcgcttgcagccgcgcgcgccgcggcaatcgaggaggccgttgctgcgggggccgttcgcggaaccgtcgagatcatcgacatcgaggatgttccgcttgcgtactatcccggtcacacgaaccgcgtgaaggcgaaagccgcgggcgatttgggcaagtagctgcgtaacgggcttcgctgtgcgtttgcttgcaccgatgcaaatgcacagcgcaaacgaccgagcaaggcgcaggcaggggcggagcgacccaggcatcgttgcatgcccgggtcgctttttcttgcttgggtacgttaagcttccattgcggcgttgtagccggctatgcgtccgaatactacggtgtcggcaacggcgtttccgcccaagcggttgccgccgtggattcctcctgtgacttcgcctgctccgtacaggccttcgatcggatttcccttgctgtcgatgacgcggcattcggtatcgatctgtatgccgcccatggtgtggtgggcggaaggcgcacggttgagcgcataccaggggcccttttcgagcttggtgctcaaaagtttccttccgaactcgtcctcgccggattctacggctgcgttataggcatcgacggttttctgaagggtgcctgtcggcatatcgatcatcttcgccagctcgtcgagcgtgtcggcgacgaacgcgtcgcctgtggaaacgcatttagccaaggggacgcctccgttcatgatcatctcgtcgggatcggggtaggtgtctccgctctgcacgatgtacatcatcttgttcgtttgctcgaagatagcgaggcagagctcgtcgcgacgggcatcctcgttgatgaagcgttcgccctcctggtttacgaagatgcttgtacccaccgagtacttaagcgcccagtctgcatcgccgttacgcatgcaggcggaatgcagcaattggatctggtccatatcgacgaggttggcaccggcgtctcgcgccatgaagatgccgtcgcccgttaccccgggcatattggtcgacttgagcgaagagccgagatcgggccatttctcgccttcgcaatactcctgtcgcagctcgacgttggcggcgaatccgcccgtggcgaggatgacggcttttcccgcattgaaggtgtactcgttgccatcgcggtccgacgcggttactccaactaccttcgatccatccatgatcaggctttttgcttcggcacgatgtgcgatttcgacaagatcgccaagggcgtctatctgcttttcgtaggtattgaaatagctcgaaccaagcactcccgttgggcggtgggtgcgctgccagagcgcgccgccggcttggtcgacctcgggtttgtactcgactcccatgctttccagctcgtggatggagtcgagtgcgttgcccgtgagagttctgatcagggagatgtttccgattttgtcgcctccgttgtaggtctgcagcgcgtgccattcgggcgtatcgaacaggctggtgcttcccgaggcgagatattcgtcgtactgagctttgacatctgcctgcagctgggcgtggacctcgtttgcgggatcttcgtcaagggcggctgcaacggtttctctgagcgtgtcggtcatctcgatgctcccttgagcctcggggtcggcggagttgaagatgccgccgctgactcgcgtgtttccgccaaggtaatcggctttttcgaggatgatgaccgatgcgccttgcttcgctgcgctgattgccgccatcgtgcctgctccgccgccgcccacgacgatgacatccgccgtcttctcgatgctctggggttcaggcttgtctttcttcgatgatttgagcgccgacgcgttgccacccgcctgttcgacgcagtcttgaacggcgttgatgatcgccatgctcgatagggtggcgccgctgaccgtgtcgaccgcaaggctctgctcgtcgatgatggcttgcggaactttggtcaaagccaaatccgacactccgacggtttcgtagtgttctccgatagcgatgtcggtgatggcgtcttccgagaaggttacggagacttcgacggcgctgtttttgccgtcaaagcttgcggtgtaggttcccgcggtataggactgggttgccgtttgcgagtcgccgccgctcggcgcgcagcccgacaggcccattgtcaatgcgcttgcggcgaagatgcttgctccgccgataaacgtgcggcgtgtcattccccgtacaaggttcttctcggtcatggtttctccgatctcgttggttctgtgtgtttccgcgtctcgggttgcgcggcgtcatgtcggcagccgcctccttgcgagacgacgacaaccttacgaaatgcgatcggggcgcaagcgcttaatggcgcttaaaatgacttcgattggttgtttaaacggcttaaaatggataagatgctaaacttcaggtgcgatcgcaccggtgcgcatcgcgcctgcgggaggatggtcgagataaacatgccgaggggaatgctggcttctttcgccaaagagggcgccgttgttttgtatgcgggcatcggcgtcggcatctaccgatgcgtccatgagtggcccgtttggctgagcgggtttttcggcgttgcggcaatgcccgagccgtttgtctcgggggatttctacctcatcgtcgattgcggaaagataatcggcgtgcttttgtacatggcactttgctatgcgctcgatcgcagcaggacgaaaagcaccctgcgtttgctgccaagtgtcgttttggcagtctgcggagcgattcctttgctgtcgctgctgggcatcccgatcggggagcagattgtcgttgccagcttcgttgggctcggtatcgggtcgggtatgctgttttgccaatgggttgacgtctgcgggctgcttgctcccataagggtggtgcaggtgcttgccgtctcgtatatcgcgcgtgctttgcttttgccggcgataaccggaatgggcccgattgcgggtagcgtgctcgctctggttttggcgggttcgtctttcgcgcaggtgcgtttctgcgttgggaagtctgctgcaacggggttggcggagtgcaaggtgccgagcgcgcgtgaccttgccggcttcagggggctgtttctctgggtgccggtgttcgcttttgcatacggcatgggcgtgagctcgactcatcttgcccacgctgccatcgaaacggggttgggtaaaatcgttcccgctttgctcgttctcgcgctctcggttaagctgggggatcgtttcgacaggggggttctgtatgcgattgccctccctctcatgacggcgggtttgatcagcatcgagtttctcggcgctgctccgtcggtttcccagatgctgctcagcgctgcgatggcaagctttcggctgcttgcgttttccgaggtatgctcttttgcgtacagcaagaaaacgtctgcaatgttcatcgggggttgcgttcggatcctttcccttacggtgaacgatacggccgtatgcctgacgagattgaatccgtcgttttggaattacgagatcgtcacccttgttgtcatcatggcggccatattcgttgggacgctggtgtatctgccgcggataagcaatcggcgggagcatcatccgcttggcttttccggcgaggaggcgaagcggaggaatctcgaggaagccgctgcctctgcggggctctcgcagcgggagactacggttttccagcttatggtcgaggggaagacgactaaggacatcggggaagagctgttcatatccaaaggcgcggttcgcgcccatacgagccgtatatacgataagttcggcgtccattctcgcgaggactttgacgcgctgttccggggatcccgctaaagcgttcgccgaaatcggcacctgcgaggcacgccgccgtccgtcagccgacgcccaacgcctgatcaaacgatcgggttatagcttgggttatgcatttaacccaagaattccctcatgcccgatgcgccttttcgatgagagggcgatcatccttgctgccgtcgagccgatgcccgttgatcttgcggagcgatgcgctatgggagcttgccggcgaagcgtactcatatgtgaggaagggaagaaacatggaagtaactcgtcgcgatctattcaaactggggagcattgccgcagttggggcaatcggaggcagcgcgcttgcgggatgcgcgccgcaggcaacctctgcggaggcctcgaaccagtcttccgccaacgaccagacccctgaatttctgaggcaacccgatcccatcaccgagttctccgaaacgaaagagttcgatgttgtggtcatcggtgcaggagagtcgggcttggccgccgttcataccgcgcttgaggcgggggcgaaggtcgcttgcgtgcagaacatcggcaccgctcaaaccactggaaacatgggcgcgtcggtcgatacgacgaaaacggacgaagcgggagtcgaggcgtgcgttgcgtacttgcttgagaaaaacgcttatcgcagcaatcgcaagctgctcgaggcgtgggcgaagaactcctacgaagccattacctggtgggctgacacggcggctcggggaggagcggaatccaagccgttcgactcttcgaaggaatacaacggatacaccttctacctgcatgcgaacacttacaaccatctcgagggggctcataacgatgctgcgctcgccatcgccgagaagctcgcttcggatggcgccgaattcttctacaactcgcctgcggtgcagttctacaaggaaggcgaccgcgttgcgggtgccgtttgcgaaaccgaaggaggatacacgctgttcaaggcttcgaagggcgttatccttgcgtcgggcgactgctcgggcaacgaggagatgcgcaactactactgccccgatttgcgcggattcaaaacgatgtcgacattccgcgacggcatgggcatgtgcgcaggcatgtgggcgggtgcccagatgacgcctatcaaccatagcaagatggtgcacggcggcggtgcgctcacgcgcttgcaggtgccgttcctcaacctcgatatccatggcgagcggttcatgaacgaggttttgagcttcgcctatctcaataaccttatgcgcgactacctcgcggaatacgactatcagaattcgatggccgcaaagtttttcaccgtcatgcctgccaattggttcgaaaccgcgcagaagtgggctgaggaagatccgtccgaagtgcagctcggcgtgggcaatatgacagtgcccgacgagagcaagttcgtttccggaaacacgcttgaagagcttgccgccaacatcaatgcgtacatggaaaaggaggagtggggtatcgatcccatcgatgaggcgactatcgttgcatcgatcgagcattacaacgaggtttgcgctttgggagccgataccgagttcggcaagcgtgcgaagtacctcgtgcccatcgaggaaggcccgttctatgcggttccccgtggtgcaaacagcgtcccggccgttcttggaggccttatcgtcgatgagaaccagcaatgcctcgatgccgaacgccagcctatcgagggcttgttcgcggtcggcaatgcttccgggcagttctacggaggcgtcgattatccgatggatgtcgaagggctttcggtcggacgcgcgatcacgtcgggttacgtgaccggtcgtcacgtggcgagcctgtaggttccagcgaatcggcgcgccgtccttttcgttcgagcatcgcctaacggcttcgcagcaacggttgttatcgatcgaggctgcggagccgctataatgtgcgcatggctttgctttcgaaacacggggactcccatcgcgtcgatcatctcgagcagatgatcccctacttgttcgcgctcggttgcgcgcgcgtctggatgacgctgacgtttgccgctcctttgtactcggcgcccgtgcctttcgatccccataccgttttcgactacggctatgcaatcgttgggatatctgtcggcctgcttgctcggcgcatagcgcctttgcaggaacagcgctggaccaaaccccttacgcttgctgcgatgctggtatcgtcagcgtgcgttttggcggcaccgagccttcccttgcaggcctctgcgctctccgtcgttgctgccgtttcgggttctttggggttctgcctcattttgcttatggtgacagaggccctcgttccgctcagcttgattcgcatcgccttgtatacggcagcctctcgatttatagccgttcctctcgtgtacctatgcgaaggtcttgatgaagcgaggctcggcatcgtggttgtcgcactgccgatcatcgcactcgggtgcgcgtcgttcgcctataaaagtacgcccgaagccgatcgcccaaagggcgcatatccgaaattcgcgtttccctggaagccggtagccctcttcgccatctattcttttgtctacggtttgcgggagcatcagctggcggcgggcgcaggcatgcattcgtctctttcgacggctattatcatgggggcgtttttcgtggtggtctatctgttctcgggtcgtttcagcgtgagcgcgctctatcgatctccgatgctgctcatggtatgcggtttgctgctgattccggcagaaggcctgctgggcacagccgcttcgagctatctcatctcgatgagctatacgctcatgtcgttgctgatagctttgctgctttacgatctctcgaaacggctcggcattgctatcattgcgctttcgggctttacaaaggcggtgacgctgttcagcgtttggggcaacgattgcgcaagcctgcttgccgcgacgccgttgtcggatcagacgcaggatatagtgatcatggttgttgttgtgatgcttgtgcttgctgggacgctcatcctgctttccgaaaaagagctcgcatccaagtggggcattcgcatgctcgagacaggcgatctatcggaggaaagcctgcgcagcgagcgcatatcggagcggtgcagcgaagttaccaagcagtatcggttgagcccgcgcgaggatgagatcgtgcgactgcttgcccaggggaaaaccaatgccgcaatcgagcgggagctcttcattgcaagcggaacgctcaaggcgcatatccagcacatatacgtgaagctgggaatacacagccgcaaagagcttgccgagctcgttgatgcgggggcgcgttaagccgcgcctgggttcaccttgctcctgccgcagcattcgcggctctgggctcgcgaagtgcgattggaataggtaatctcttggaatgcacacttttccgcgaaatgttgcgttttgacgctatggaagcgctttgccgcttgcgcgaatgattgggaagaggtgttttcccagttgggcagacactcgcttccaccgaaagaacgactccgtcgaacaagcgcaacatttcgcggaaaagtgtgcagcgagatgcagccgatgcgcctcacgccgcggaaccgatgcgccgcacgcccgccgactaccgacgcacgccgcggaaccgatgcgttgacttctcatcatttgcgtttgcctgtgctatacttcaactactttagcacagtaaagaagtagagtgctaaagtgcttgcatgagcgatttccaaaaaattcgaacgggcaagcgcaagaaaagggaaagggtgcagcatctgtgcggggccgaacgaatcggcctaagccgaaagcgggtcgccgtcccaaatggatgcgagagaaaaacacggaggatgcaagacatgaagaagaaacttttggctatcctgagcgcagcatgcgtgctgtgcctgtcgatggttctgctggcgggctgctcttcaggcggcgacggcgcatcgcagggaagcgaaggcggcgacgcggctggatccgatgccttcacgctgacggtcggtttcgaccagggctatccgccctacggctttgttggcgacgacggcaacttcaccggcatcgacctcgatatggcgaaggaagtctgcgagcgcaacggctgggagctcaagcttgagcccatcgactgggatgcgaaggatgcgcttctcaacagcggcggcatcaactgcatctggaacggcttcaccatggagaaccgcgaggacgactacctgttctccgagccctatatgctcaacgagcaggttgtcgtcgtgaaggccgacagcggcatcgcctcgcttgacgaccttgcgggcaagaccgtcatcacgcaggtcgactctgcggcgctcgacgtgctgagcgacgaggagaacgccgacatggtcgcgctcaagggttcgctcaaggagctccagaccatcggcgactacaacaacgcgttcatgcagctcgagtcgggcatggtcgatgcggtggcttgcgacctgtccatcgccgcgtatcagatggcggcgaagcccgatgtgtacgtgcagcttgaccccctgtcgaccgagcactacgcagtcggtttcaagaagggcgacgacgaactcgccaagacgatcagcgatactttgaaggccatgtacgaggatggcacgatcaaggaattgtgcgacaagtacgccgagtatggtgtatcctacgacaactgggttctgaaataggaaatgcccggcttcgtcggctcgggcaggtgcgctttgcgtgcggctcgaaccgatgggcatgcgggtgcggcggcaagcatcgcttcgatgcggaaccgctgatgataggtgcgaaagcgggcgaaggcgatagccttcgcccgtagctacgtctagaaaggctgagcggtggaatttggaacgatgatggagatactgctgtcgggcctgttgtttacggctcagatattcttcacgacgctcatcggatcgctgcccctcggcgtgatcatcgcgttcgggcgcatgagcaagatcaagccgatcgcgtggatcactcgcatttacatctccatcatgcgcggtacgccgcttatgctgcagctcatggctcttatgttcggcccgtactacctgttcggacttcaaatggggcaggattggaagtacatcgcctgctcgatcggcttcatcatcaactatgcggcgtacttcgccgaaatctaccgcagcggcatccagtcgataccgcgcggccagtacgaggcggcttcggtgctcggctattcgaaaacccagacgttcatgaagatcgttcttccccaggttatcaagcgcattctccctgcgatgggaaacgaaatcatcacgctcgtcaaagatacgtcgcttgcattcgtactcggcgtcatggagatgttctcgcaggcgaaggcgcttgcggcatcgcaggtgagcatgattccgtatctgatcgccggcgtgatctattgggtactcaacttcattgtggagatgatccttacccgcatcgagaagaagctcaactactatcacgattaggtttcgaggaacgcgaggagaaccgctatgatgcaggatgcaaccgtcgtatcgatcgagggcgcccgcaagagcttcggcgaaacggccgtgctcaaagatatatcgcttgccgtgcgcaaaggcgaagtcgtcgcggtcatcgggccttcgggcggcgggaagtcaacgcttttgcgctgtatgacgcttcttgaaacccttgacggggggacgttgtcctacggagatctgaccgttgcggaaaacgatgcggcgggtcggaccgcgtacgcgggcaaagccgtccagaaagaggcgaagacccgtttcggtctcgtgtttcagaatttcaacctgttcccgcactacaccgtcatgaagaacataaccgatgcgcccatccacgtgcagaagcgcccgaaggaagaagttgaggcgcatgcgcgcacgctgctttccaaaatgggccttacaggcaaggaggacatggtgccctgcgagctttcggggggccagcagcagcgcgttgccattgcccgggcgcttgcgctcaatcccgacgtgctgtttttcgacgagcccacaagcgcgctcgatcctgagctcacgcaggaagtgctgaaggttatccgcgacttggcggccgagcatatgacgatggtgatcgtcacgcacgagatgaacttcgcgcgcgacgtggccgaccgcatcattttcatggaaggcggcgtgatcgtggaagagggcgatgcgagaagcctggtgaacgatccgaagcacgagcgtaccaaggcgtttttgtcgaggtgcaccgaggagtaggctttcggtgcggtttgtgcggtaccatgggtgaaacgacccgcggaagccagcgggttcggcactcgagaccgaggagaccgcatggaaaaccaaacctcccagaacccccaaaacccccagagttcccagccgtcgggagcccaaagctttttcgacgatgccgcacgccttttcgacaagggaatatccaaagctcgcaccgtcgtttccgaaacgtcgatcgagcagcgctcgttcgtcaaggctttcgtgcgtctttgccacgacggctggcttcagggctggcacgagagcaacggcggcaacctcagctatcgcatgcggcccgaggacgtttcggcttgccgctcgtttttcaacgagacgccgggtgaatgggtcgccatgggaatccaggctgatagcctgcgcggcgaattcttcctggtaaccggagcgggacgccattttcgcagcataccgctcgatccgtccgagaacatcggcatcatcgagatcaatcagatgggcgatgcgtggcgtctcgtgtggggcatccccggcggccgaccgaccagcgaattccccagccatttcatgatccatgccgtgcgcaaagcggtgacggcgggagagaaccgcgtcgtataccacgcgcacaccccgaacctcatcgcgctgacgctgctcgatcaactcgatagccgcggcttgtcggtgacgctttggaagagcatgaccgagtgcgccatcatggttccgagcggcatcggcgcggtgccgtggatggtgccgggcagccaggagatcgccgttgccacgagcgctgcgatggaaacgcatccggcagtcgtctggtctcagcacggcaccttcacgacggctcctgatttcgacgcggcgttcggccttatgcatatccttgaaaaagccgcgggcatttatctttccgcccgcgctgcaaacggaggcgatcagatcgatttcgcggtatccgacgacgatctgcgcgcgatggccgagcaactcggcctgccgatcagggctgaatacctggggtggttccggagcaattagggttgatccccacgagctcgaagagctcgtcgcgcgagtgaaggcccatcttctggtagatgtgcttgatatgggtcttcaccgtgcttttggcaacgtagagttcctcttcgatggcggccggcttctttcccatgcacagaagcagaaggatctcttcttcgcgcatcgtcagatcgtactgtttcgcgagttctcggcatttcatgccgatacggttcttttcgaggtacgcatcgcgattcttgtcgagcggttgcttgagcaggacgccccagggtgacgagagctgtttttcggaaaagaagaaccgggtcacgatgacgatgatgacggcgatgatgacggttgtgggcacgaacgccgcgctttggggcatgtcggccacccagatgaaccggctcgcgcttatcccagcttgcacggcgatcagcctgacggccctctctatgccgaatatccacagcgcgcaaacgccgtagcggtacgaaaggttgctcagtatcaccacgatgagaatggtgtagagggtgtagcttgcaactgcgcagacatcggtaagccatgacccgcctggaaggaacagcccgaacggcacgagtgagagcagcatgagcggcatcgcaagtttccagatgagggagaagtcgaacgtctcgcgccgtagcatgatccccagatacacgaacagcgccgcaaagagatccccctcgcccgagctgtagctcagatagccgtggaacacgctttcgtgcaagccgaatgcgaacgagtacaggcaaacgacgaggatcggtttccagggaagcgaaaacttcccccagcttgcgtgcgggtattcgtcttcgggaagcgttttgtacgatcgccaaaggcatacgagggaaagggcggggatgatgcaggtgcccgcccacagccagtagaaggcgaatcccttgaacacccataggataaagacgcttacgatgattcccgccgagtagtacagggcaacgcgcagcgggttgatgcacccgtagaattcggaccagagcatcaagatgagtccgacgccgagtgcgccgagaaacagggcgggggtcgtgagcgtggctgcgagctcggggtggagcgccgtgtagaacctcatgcatgcgcacgctatcataagcagcccggtcagcgggaagatgaacggcttcttgcagagggggacgatccagcgggaaagtcctgcaaggcagagcaggaacacggctgtgacgatgtcgaagtagccgtacgtgctgaagtcgacgaggggaaacgcagcgctgtcgttgacggttcccgtccaaacgcggaatatccccatgcccaaaaagcagaacggggtcgggggaatcttgtcccacagcgcatcgagcagtttctttctgccagcctcccggatcacgcgaacctccctgtatcgcgtaaatcaactcaagagattatagaacagataaggtactccatagggcagataaggagaaatccccccacatttgcccgcaggggggagaagctgattttgaaatccccccgggcgagacggtgtcggacgatgcgcgggtttcccctcggtcctacgatggggtcaacggttcggatgctcaagcgatacgagccggaaaaccaacggctcgagcacgggatccaggggccgtccaacacatcgatacaaaggagggaatcatgaaggaatcgatttcaagaaggaacttcctcaagggagcactcgcgacgggcacggttgtggcgggcgcgggactggttggttgcgcaagcggcggggccgatcaatcggcgaaagccgatacggcgggcgcgggtgccgggggcgccgcgcagggccgctggagttggtctgtgaagcccgatcccattaccgatatcgccgagaccatcgagtgcgatgtgcttatcatcggcgccggcgctgcgggcgttccggcggcgatgtatgcgggcctcgaggggatcgatgccgtcgtcatgcagaaggaggcggtcgttcagaccaacgggcagggcttcggcacgtggaacaacgaatggggtaccgagcagggcatcgaatggaacatacctgcgaccatgcaggcgttcgccgatcttgccaacggcaaggcgaacctcaccctcgtgcgcaacgttctcgagcgcacgggcgagtgctccaagctcatcatcgaaaacattcccgagcctaagccatctcccgccatcgtcgacggctatgtggcgtaccgctggctctacgacaacgacaactccacgcgctacaaggcgtttgccgatctgtacaaggccatgggcgaaaaggccgaggaaaacggcgtgcggttcctctacaacacgccggcggttcagctggtcgtcgatgatgcgggcgcggtcacgggcgcaatcggcgagcagaagggcggcggatacgtgcaggtgaacgccgcgaaaggcgtggtgctctgcacgggagacatatccgatgacgatgagatgcttgaggcgtattgtcccatcatgctcgatatacccacactgcacgcggttccctgcaatacgggcgacggccacaagatggggatgtgggcaggcgcgaagatggatcttccctcggtcggcctcatgatgcacttcgacccgagcccgctgccgcagggagcggcgccgttctcggccgtgccgtggttgcacgtgaacatcaacgccgagcggttcaccaacgagaacgtcggctaccagcacctcgccacggcggtcgccatgcagcccgagcaccgcgcgttccagattatcgattcgcatctgctcgagcatgcgaccgagtacaccaacggcgggcgccccggcgatgcgaaggcgctcgaagcgggcgtcgaagcgggtcagattctcaaggccgatacgatcgacgatcttgccaagcaggcggggctcgacgcaaccaagctcaaagcaaccattgatcgctacaacgagcttgtcgacaagggctacgacgaagatttcggcatggatagcaagttcttcgtgttcaacggcatcaaggacgcaccgttctacgccatcgagcgcatgcccgcgaagcttgccgtgtgcggcggccttgcatgtgaggagcactgccaagttctcaacgaggcaggcgagcccatcgagggcctgtacgccgccggcaacgtgcagggttcgttcttcggatacgactacccggtggtcgggttcggcgggttctcgctctcccgtgcggcgacgggcgccattcttgccgtcaagcagatgatgggaaccttcgacgagcccattgcgtaagggagttttcgacgggtccggtgcagtgcgatgctgtgcgctgaaccggaccttatgggttcgcgtcagaccggggtgagagtgaggcctgcatcgaaagatatgacccctgtcgggtttcggggcatagagcagtgccttgcggacttgcttcggttcaggcggcgagatgctttccagccggccccaatctgtcggggccggctgcgtttcgaggcctcgcctatattccaggagcgggtctcgcgcgggaagctcgggtctttgcgtttggggcggggttgccgcttccaaatgcacgtttttttccgaaatgttgcgtttcggcccgacagccaagccatccgccgttccgcggttttttgccatctggggaaacgttggctcggcagcacgaaaatcgatcctggctcgcgaatgcaggcgtttggcgcaacataccgggaaaaagtgtgcactcgggaccgtgtctttgtcgaactggaggcgagcctttgtctcgggctgcgttttcgggttgtgttttcgggttgcatgtcaaaggctgcatccatgggtttcgctgtctttgagcctgcgatgcgcagaagaagggaccgcgagttgcggtcccttctcgctggttgagctaagcgctgagtgcgtttttaaccgccaagcgtgcaaacgtgagattctttcccgcatgcagccccccgtaataccaaggatagctcatgccgtagaatcccccctggtcgttgccgaccgcataaaggccgcggatcgcgtttccttcggagtcgatgacttcgagatttgtgtttacgcgaagaccgtcaagggcggcaagccccgtttcgcccgtgatcatatgcatggcgtaatagggaggctcggttacgccgaccatgcggaagccgatcttgccgaaatcatcgtcaacgcccttttcgcaaagctcgttgtagcggtcgagcgttttcttcagagcctcagccgtgatgtcggggctcttctcctgcatcttcgttgcaagttcgtcgaggctgtcggcttgaaccatgttgcccgattccagctgcggagccatgtacatctcgtagaagttgtcggcatccgtcggcacgagcgtggtgcaaacggcgccgggggcgggcaccatgcgcgagcagatcgtggtatggtacttcgtcatcgcgtcccagtagttggcgtcgaagatgttccaccagtcgttgccggggttcatggctccggcgttcgccccgaagtcgtagggggcgtcttcgttgcagaacctctcgccgaacttgttgacgcgcagccagggttggctaccgggggtccatccgccgccttcgatgctgcggtcggaactcatgacccatgcgcatcggccgtagtcgccgcctgcccatacgcccatcttgaacccgtcgccgccgttgtcttggggattgctggtcagattctgcgattggttgggattgagcttttccataaggtagcgattaccggaatagcctcccgaagcaagtacgacgcccttgctcgcggtgaacctcacgtagtcgcctgcctcgtttttcgcgatgacgcccgttacccggtcgccctctttaacgagttggacggccggggttttgtaccgaaggtcgagccccaagcttaccgccttgtcgagcagaacggggtgggtgagcctggtacccatcttgttcggctgcatttccttgtagggtttttccacggggacgtgcgcaaccggcgggcttgcgtgctttccgcccgtgtctttgttgtccgtttcgacggcgaattcgagcgtgccgctttcctcgagttcgtcgccgtaccagtcgatcgcttcgccgctgttgtcgtaccagaggttgatgagtctttggtcggcacggtggttggcgtaccacatgaggtcgttcactatctcgtttcggtcgaatgtgagtccaagctcgttttggtagcggctgcctattcccgcgaaccagttcggtgcggcgaagaaggtgtctcccttttcgaggaggaccgtcttggcgccctcctcgaccgccgtcagtgcagcgggaatgccgctcgtgcccgctccaacgataacgatgtccgcctctatcgtttcggcgatctcgctctcctcgatgggcgcaggcggcgcggtccagtcttcgcctgccgtcgaggcggaggaccccccagcggaaccctgtgctgcctgtggctgtccgccgcatcccacgagtgctcctgcgccgagggcggcgcccgttgcaagcattcccgtgatgaagctgcgacggttgatcgatgtcgtttgcatccccatgacgtctccttccgaaggtgtttgatgacggaaagatcgttgcatggggagagtcgatctgacatctacccaaaggtgacatttgccgaaacgggtaaaatataccaaaagggtataggtatctaagataagatgaccataaactagatggatgttttcaggcgaggcgggaggtgcgacggcgaacgtggatggtggcaagcggttatcgagattggcggtcaaaccttggcgcctgctcggattcgggtactatcaagcgtggatatatctggcagtgctcagtacggttcttttcaccgatcccgattttttctcgaaccatttgcagtttactcgccagtatttttcgctgagcgtcgcggtttgcctgttctgcctgatcttcgtcagtcagaagctcgacatactcagcaagcggcattatcttttggtggcagcggcttcgttgacggccatgggcacggttttgatctctcttccgttgcaagatccggatttgcattttgtcgtagtcgttgtcggaatgacgatgacgagcataggcaatgcgtttctcatcgtaacgtggggcgccctgtggagcaggatggataccgatcgaatgggtctgcacctggtagtttcgaatgcattcgcgggctgcttgtatcttgtcgtcaccttgctccccagctttatcgcagtgatgcttacggcggctttgcctctttgctctgcgtttacattgctggcaagcgaggatgagccgctcaggcagcaggaagacaccgccgcgaagccgaagcggcttttgtggaaggctattgccgcgatggcggttatccctttcgtcttcggaatcgcccgcgcgttctcttcccccgttgaggctgctgatttcaacggacttcagcacatgatcgtgttgggcatgacggtttttgcaactgcagttgcccttttcgttaccttggcgccgaagcagcgtatcgtcattcgtctttaccggttcgttgtccccctgatggcggcaggctttattgccctaccgtttattccgaacgcatatcggtggatggctttttcggctatcatgtgcggattctattcgttcgagggccttgtgtggctgcttcagcccgagtacgtgttcagaacgaaaacatcgacgatcaaggtgttcggatggggaagatgcctgttccacttcttcggtttcgcgggggcgacgttcggattctacgttatcgatcaaggtatggccctatcctcgataccggtacccatctgcctggcgctcgtgttggccttgatcgtcttatcgacgtatgtgttcaccgagcatgatctgcggctgtttatcgcaaagcccaagccggcttacgaatccgatgacgctcacgtgtatcgcgccatgagcgcaaagtacggattgtccggcagggagggcgaaatccttgcaatgctcggcaaggggaggagcgctccgttcatcgcagattcgctgttcatatcgaaggggacggtaaaaacccatacccgccatatttacgacaagatgggggttcatagcaagcaggaactgcttgatctgatcgagggcgaaagcaggggattccgctagttgggtcgacggtgcgattcgttgcttgggaagcgggcgcgctaaggtctccctggccgtttaggcggaaaccccgttgtttcttgagattgcgagaggtgggcgccgcgatgatatcggcgctcggatgaggctgcgatgcgcaaaagaagggaccgcatcgtttcggatgcggtcccctgtaaaatcgttttcggtgcttgtccggcgagaggttagtttactcctcggtctgcttcagcaagccgtagccgccatcgtcgcggcggtagagcacattcacgaggttggaatcgcgatcggtgtatgcgaagaaatcgtggcccagaaggtcgatctttacgagcgcctcttcttcggtcaggggttcgaactcgatttccttcacgcggacgacttcgtcatcggagagttcttccatgagctcgtcgaggcttgctcctgtggcgggaatgggatcggcagcgatcttttcggcaccggcgcggactttgcgatcgacgacacgggtcttgtacttgcgcatctggcggagaaccttcgctgcggcaacgtcgatggccgcatacatgtcttcttcgctttcttcaacgcggatgatgtggcctttggtgcgcagggtgacttcgcatacggcaggacgcgggttcgccgggtttttctcgacgaacaggactacttcagcaatgaggggatcgatgtccataactttcatggagttcccgattttttcttcagcatactgacgcagtgcttcggttacaggcattttgcgtccggtgacggtaatgctcatggcactcacctcttacgatcgtggcgaataaaaaacagcttggtcaggacgttttcaggcatgcagcgatgcttttcgatcgacacaaacccaaacccgactccttccgtcaagctgatacgaacaggatagcgcattgtcagagggttttggtcgcgtgcacagaaagcagttgaaaaattgtaaacagtttatcgatattcgagattggtgcttgattacgcgatagtatactttcacggacagatcagctaagatgcctataagccgacagtggggttcatatgacgggaaacagtgcgggaaacgaggcggggaaagactcgctgttcattcaggaagttgccggacatcaagcgctttacaaaaggataatccagctgttccattcgtcgaccaaggcggctgcgttcatgctgatcgccgccatcgcggcgctcgtcatcgccaatacggcgttctacgatcagttctatgcattttggcatacggaagtgggattcttctttggcgaggctaaagccgagatgtcgctggcgcatgtgatcaacgacatcttcatggcggtgttcttcctgctcgtgggactcgagatcaagtacgagatgacggtgggcgagctcacgaacatccgccaggcgctccttcccatcgtggcggcgtttggcggcgtgttcttcccgatcatcatctacctcatcttcaacgcgacgaaccccgagacggcccacggttggggcgttcccaccgcgaccgatattgcgttcgcactcggcatcatggcgcttctgggcaaccgcgtgcccaacggcatccgcgtgttcttgagcacgcttgcggtggccgacgacatcatcgccatcctcgttatcgccatcttctacgggcagagcccctccgccttctggcttgccgcggcggcggtcgtgttcgtggcgctcatcgttatgaatcgcaggcacgtttattcgctgacgccctacatcctcgtaggcatcgtgctgtggtactgcgtgttcatgtcgggtgtgcattcgaccattgcgggcgtgctgttggctttcgcgatcccctcgggctctcgcgtcaacctcaagagcttcatttcttggtcgggtaaccgcatcaaggaagccaaggagctctatgagccgaacgacccggtcatcggccagaaagattacatcgaaacggtgtcgcgcttgagccgcgtcgcccgtcaggtagtgccgcccgcaacgcgtcttgagaacaagctctatccgtgggtgtacttcgccattctgcccctgttcgcgctcaccaacgccgacgtgtctttcgtcgacggcagccttgggaacatcttcgccgacccagcgctctatggcgtgttcttcggccttttgattggcaagccggttggcattatgctgttcagcttcatcatcgtaaaaaccaagctcgcatcgcttcccgaacatgcgaactgggggcatatgttcggtgcgggcatcttgggaggcgtcggcttcaccatggccatcttcgtggcgaatctcgcattcgacgatcccgccatcgtgaccacggcaaaacttgcgattctctcagcttcgctgatcgcgggcgtggtgggctttctcgtgttgttcatccaggcgaacgcggcgcgcaaaaaaaggcgtcgcctacatagccacggcacccgacggcgcggctcatcctgcttccgataaggaatatatggaagccggcaagcgcatgctcgaagagatcgagagcccgcttctcaaagaggagatcgaagccgcgcagcgcgaaggcgacgggtatgccgagatcgtcgttgagcttggcatcgacggcgagcgaagcgatcgggcggcggccgagggatcggacgatcccgacaggctcgacggagcggggccggatggcaagggttcgacggctagaaagaagtaggaatataagtctttgcataccgtattcgagggggttcgaacggaacgcccttgctttgaacgcgtgacgcagagaagatgttcgttgcctgctggctcgaagtgcacgtttttggtgggacaaaatatgttcgaagcgcccgcttttgaaaacgctgcggttgcagggctgctcgggtcattctttttcgacgctgcatcatgttgtatgatggcggaatgcagacgcaaggcgatggaagggggccgatggatgcggataatctgaaaatcgatgaaggctttccgtcccttcaaggcctttttcgatgctttgggctgcttctgttccttgtttcaaatgatctgatcttgcgagaacctgctgtgtttctcaacggtcttggagcggaagcatacagcttggctctttttcgcgttttcatgaatacggcctttatccttgccttgctcgtgggaggagtgtattcgctggcgaagaagagagagctggacgtacagcggcttttcgtttttcaggttgtcttaggaactgtttttctgttaaccgccatcggcgtcttttgcgatcccctcccttcgacgcttctctatgctatgggcgtcagcatggggctgtttgccgggattggtcttctttgctgggttcgtatactgtctgtcgttacgatcaagcacgcgtggctcgaagtcatcgttgccctttttgcgtccgctttgggctatgccttctttctttatgctgctgaaacgattccggtcgcaccgtttttcggagctctctatctgctgtctgtttttgctaccggtttgctttcgagggggcttgacgaaagaccgattgaagtcgattcgcaaaaaggggggtttggcggtgtggtgaagagaaactacgcaacgatcctttgcattgcggcgctcaacttcgtcctgaccgcgtcgcgttcgtctctgtcgctcgctagcgattcctttgtaaacaccatgtgcgtgattggtattctcttctcggcggttgcgctgtttgccgtgtccgcaacgaagaggtttggcctcggcatgacttccgtgtatagaatctcctttcccgtcattgcgcttgcgttccttatgcttccctttatgtcggagccgatacgcggtgccttcatgcttgttgccacccttttcggaacaatgggatcaacggttctctttcttatatcgttctcggaaaagcagaggtcgggattgccggctaccgggctatacggcgtttcaagcgggtttatgcatgcttttcttctcgtgggcctggttgtccagtttggggaggttgatgcggcgagtaccgatctcatgcgatacatagtcgtggcctcgctgcttgtgtatgcctttctcatgctgttcgttctcagtctcagaaaaggggatcggcgcaagggggcgcacgggatcgtttttgtgggaacggaaggggcttttcgcgaacaatgcgaatcgatagcgatgagattctcccttacgcagagagagcgagaggtgatggagatgatcatgctcggaaacggcgttggagccattgccgataaattggggatatccgccaacaccgtcaggacgcacaacaagaatctgtatagaaagatcgatattcacactaaagccgagctgctcgagatgctttccgaggaagttgtggcagaggatcgttgaagagctacactcgggttctgcggggatgcagaacccgagtgagcctaccgctgatgggttcagtgcgctacaggagactacatgcgtcagtcgcggcggttcgtcccatgttgacggcgtttccactgcaagagccgggtgcgtcgattgtgtaaacgtttctgtagagcatgcagccgtcgacgccgactgcgtacaaccctggtatttctgcgccatcttcgtttgtgacacggccgctccgatcggttgctatgcctccgattgtcataaggaacagcgtttcgggtttcgttatgtagaatgggccttcggtcatcggtatgagccactgtttgtctttacaccagtcttcgtcgaacccggcagcgcaataattgttgtatttttctatttctgcagcgagctttgcgccatcgatgccaaaatactccccgagcccttcgatggtatctgctttgtataggctgttgccctcgttcgttttcagggattcttcgagtatctttcgaccatcctccaccttgacgccgtacatttcgcagacggcatcgtagatgctcgtatcgaatacgaagtaccattctttttggttccaacgcggtgggttctgctggcagaagttaactgcgccgcagtcttcccggcaaaagcgttccgcctgctcgtttatccagatcatgtaacctgacatgctcatgccgcagttgggcatgtctactggcccttcatggggaagggcgcggatgtaggcatgcgcgttgtcagcggcctgatgggaaaagtctttaccaccggcttccagggcgattctccagcctcccccatcattggtgggggacccgtagtaccagatattttctgggttgtatccgatgcgcgagagcatttcgctatcggcgccgaatccccccgttgcgagaataacggcctttgcgttgatctgaatccaatctcctttggagttttgggccaggacgccgacaacggaaccattctccataaccggatgctcggccttggtggagaggaggaactccacgccgagttcttcagccttggcggtcatcggcgggacgtatccgacgcccgcttttccgtctttgtaccagtgcatgcttacgatgcctgctcctgttccgtagtcatttacctcgccgttgaattcgacgccttgctcgataagccaggcgatgttgtcgcccgacttgtcgtacagatcgcgccacaagcgaccgtctacgcggtattgcgtggcagccatctcttgggcgataagagatgagaaagcgaactctatgccttgctgtttttgcagcggcgatccttgggcaaacgttccctcgacgccgcttccgttgcccccggtagcccctgcggcctctatgcatatgacagaagcgccttcctgtgcggcttgcacgcaggctgccaggccggagattccagcgcccacgacgcaaacatcgcaatctctcgtttccgagggggtaatgacgttggctgcctgttcggcagtttcacttgtggatccatcagccgtgtcttggttgctgcatccggcgagtgctactgtcgccgctgcgcaggctacggtcatgctgccgacgaattgtcttcttgagatactcacgattacctccgttgttcgttggtgtttcccgattcgccccatttcgctatcgggcgtcattcgattattgctagaagcgccgtacgagaaatacccaatgcgagggtattctcccgctaccctttaggatgtgatgagggtgatgccttccaggtccggcttgcatgaccttttgagcgggcgtgagcttggtcttctgcgggcggagcatgtacggcgtagccaactgcccccatcgatttttcgggcgttgcggtatactgatttcgtctaaggaggtcgggtgcggtgcgcgctatgccgcgcaccgcacccgactaaacgtttacgttgatggaggatcgcctcgatggaaccgcgcgctatcgttctcgccgcaggagccggcactcgcatgaagtcaaagaagccgaaggttgctcacgagctcttgggaaagccgctcgtgcggtgggtcgttgacgctgcgcgcgcagcgggtatcggcgaggtggtcagcgtggtcggccacgagcgcgaacaggttattccgcttgtcgaggccgacacgcagatcgttgtgcagcacgagcgcaggggaacggccgatgcagtcgccgtatgccgcgaggcgttggcgggcttcgatgggtcgcttgtggtgctttcgggcgattgcccgctcatcactcccgaaaccatccgcgcgctcgtcgagaagcgcgagcagagcaatgcggcggtcgtggttctcaccatgagcatggatgaccccttcggctacggccgcatcgtgcgcgacgagacgggtgcggtcgagcgcatcgtcgagcagaaggactgctcgtccgatgaagccgctatcaccgaatgcaactcggggttctactgcttcgacgcgaaagcgctgttcgaagcgcttgaacaggtgggaagcgataacgcgcaaaacgagttctacctcaccgacgtgctcgagatctgccgcgaggcggggcgcctcgtgtcggcgctcgtcaccgaagatcccgccgaatgccttggcatcaattcgcgcgttcagcttgcccaggccaccaagttcatgcagcggcgcatcaacgcgcgccatatggccgagggtgtgaccttggtcgaccccgagcttgtttggatcgggcccgacgtgacgattgcccgcgatgtggttctcgaaccgctcaccttcctgcttggctcaacttcggtgggcgaagattgcgttatcggtccgaactcgcgtttggccgataccgtggtgggcgagggttgcgttgtcgacgagaccgttgccgtcgaagccacgatcgacgatggcgcaacctgcggcccgcgcacctacctgcgccccggagcgcacctgtgcgagggcgcgaaggcgggcacgcacgtcgagatcaagaagtcgacgatcggcaagggctcgaaggttccgcacttaagctacatcggcgataccgagatgggcgagggcgtgaatatcggcgccggctcgatcacctgcaactacgacggcaagaacaagcacaagactacgatcggcgacggcgtgttcgtgggaagcgacacgatgctcgttgcccccgtgagccttggtgacgaagcggttatcggtgcgggatcggtcatcacccgcgatgtggctccgggttcccttgctctcgaacgttccaagcaagtcgagattgccgattggaaagcgcggaagttttagcttggcaatggcggccttcgcaagcgtgctcgtttcacgatggatggcaaatcttcttcgtataacagagaagatttgctagtatcttatccgtcagacggagaagatcggagtttttatgtacgagtcccttgttgctgagtacataggatttagcattccgccctttgttccgcgtaggaacatggatttcgacctgccgaaacccaagcagcataacctcatttactccatagtgggggtgcgcaggtgcggcaagacgttctttttatatcagcttatggatcggctcatgcgcgagggtgttccgcgggatcgaatatttcatttcactttagacgacgagcgggtcatgccgttttccgagcggacgttgtcggatctgctcgatgcgtactacaagctggttcccgaagccgttgaaggctgttacctgttcctcgacgagatacaggaagcgccctgttggactaacttcgtgcggcgcatatcggaacagcgaaaggttaccatcgtgcttacgggctcgtcttcgaagctgctttcgaaagatattcccacgcatcttcgcggtcgatccctgtcgaaagaaatatggcctttgggctttgacgaatactgcgattttcgcggcgtcgttcatgagggcgtggagtcgttgactgccgaggcggcgggtcgccttgaggtggcttttttcgaataccttcaggtcggcggtttccctgccgttcaaaacatgttgccgctcgatcgggtgcaacttttgcaaggctacgctgcggagatcgtgacgaaagacgttctcgagcgcttcgaaaccacttcgattcgggttgcggagcggttcgcccgtaacgccttacgttcgacgggtctgaaattttcggtgaacaaccagttgaaagacattcgagctgccggtatgtcggcctccaacgagaaactgtatgcgttgctggacgatttggaggacgcccatctggtcttcagggttaacgactacactctttccatcaaggagaatcccaggtcatcctcgaaggtgtattcggtcgatccgggtttggcgctcgccgttgcgccggcgagccatctggatgttgggcaacgcctggaaacagcggttttcgtggagctgaaacgtcgattcggagcggacaggacgaacgtaatcgcgacgtatagcgccgttgattgccctgaagtcgatttcatcgtcggcgatgtggcgctaggggaccagcatcagctgctccaagtggcggtccgtacaggcgccgaagcagggcttgggctttcgccggatcggctgccaaagaagtacaagagcgaaatcggcaatctggagacagcgatgaaacggtccgggctcgataccggggcggtgatcaccttgagcgaggaggccgaattcccggtaagctcaggcactgtgaggctcgtcccagcttggaagtggtttctcgggcggtaggctccatcgcctgttcggctgccgatggtggaaaaaccacgatagttggccattgctgcatcacaagcagatgacttgcggatacaatacagatcgactaattaatgcggagtccgaaggagcgcgtcgatgaccgaaatgcagaagagtatggccgttttctccggttcggttaaccccgaactggccgatcagattgccgatgagcttggcatcacgctcggtcatgtgaaactcgaacaattcgcaaacggggaaatctatgcgcgttaccttgaaagcgtacgcggcgccgatgtgttcatcgtgcagtcggtggcgggttctcaggtcaacgatgcccttatggagcttctcatcatgaccgacgcggcgaagcgcgcatccgcccgcaccgttaccgcggttatctcgcattacggctattcgcgtcaggaccgcaaggcggccgcccgcgaacccattaccgccaaactcgtcgccaaccttatgacggttgccggcgttgaccgcacgatcaccatcgatttgcaccaggggcagatccaaggcttcttcgataccccggtgaatcatctgactgcgctgcccatcctcgccgattacttcaaggccaaaaacctcgacatggaccgcttgtgcatcgtgagccccgatgtgggtcgcgcgaaggccgcgaagaagctctccgacatcatggaagccgatctcgccatcatgcacaaaggccgccccggccacaaccaggccgagatcacggcgctcatcggcgatgtccgcgacaagatctgcatcatcaacgacgatatgatcgatacgggtggaacgctcgtggcggcggtttcgactctcaaggcgcagggtgccgatacggtgtacgtgtgcgcaacgcatccgattttcagcggccctgcctacgatcgtttggaaaactcggagatcgaagaggttgtcgtgtgcaacacgatccccgtgccgcttgagaagcagaccggcaagatcaaggtcgtttcggttgcgccgctgcttgcgcgcgccatcgcgaacgtgtatggcaacggatcggtatccgaactgttcgatcctgatttcgcgctgtaggccgctcgggatcgccgactggtagctcatatggctgatacgtatctgatagcgggattgggcaaccccggagacgagtatgcgcatactcgtcataacgccggattcgatacgatcgacctgatcgccgaaaaactcggggcgcggtattggaagacggaaggcggcgcgctgacggcgaaggccgttcttcacgatgtcgatctggtgcttgccaaacctcagagtttcatgaacacatcgggcgggccggtcaaacagcttatgaacgcttacggcgtcgatgccgatcatctgatcgtcattcacgatgagctcgatatcgacccgggaaccgtgcgcgtgaagttcggcggcggacatgcgggtcataacggcttgcgctccatctgcgataagctcggcacgcgcgattggtttcgcgtccgtatcggcatcggccgcccgcctggacggatgaacgtggccgactacgtgctctcgttgccgcgcaaggaggcaaaagacgatttcgacgttgcctgcgcgcgcggcgccgaagcggtgtattccctcattgatcacgggcttgcgaaaacgcagcaggacttcaactgaacgccatggcgtcgtcggctcctgaaggcagcgcttctgagaagtcaaaaccgcgtgacggtttttcgagccgtgccgcgttcatcatcgcctgcatcggatcggccgttggcatgggcaacatctggctgttcccgtaccgcgttgcggaattcggcggagcggcgtttctgatcccgtatttcatcttcgtcgccctcctcggcttctcgggcgtgctcggtgaaatggcgttcgggcgcgctatggaatcgggccctgtcggggcgtttgcgaaggcatgcaagatgcgcggcggccgtatcggcgaacgtatcgggcgcgccatagggtttcttcccatgctcggttccctggcccttgcgatcgggtattcggttgtggtgggttggtttctcaagtaccttgcctcgtcggcttcgggcgaacttgcgggcgttgtcgatacgggtgcgtacttcggcgcattggcggttgatttcggcagcgtcagctggcatttcatcggccttgcgctcacgttcgccgttatgctgttcggcgtgtcccgaggcatcgagcggctcaacaaagtcatgacgccgctgttcttcgtcctcttcgtcgtgctgctcgtgcgggtggcaacgcttcccggcgcgggagcgggatacgaatacctcttcattccccgatgggaggcgcttgccgatccgacaacgtggatattcgcgctcggccaggcgttcttctccctttcgcttgccggaagcggaacgctggtgtacggaagctacctcaagaaggacgtcgatgtggtttcgtcggcgagaaccgtcgccgtattcgatacgattgcggccctgcttgccgctatggtcatcatccccgctgtgttcgcattcggcttcagcgccgcatcggggccgccgctcatgttcatcacgctgcctgccgtgttccagcagatgccattcggctcgtttgttgcggtcgtattcttcttcgctgtgctgtgcgcagccatcacgtctcttgttaatctgttcgagacgccgatagaagcgctccaaagccagttcgggctttcgcgcggggttgcggtcggcatcgttgccgccattgcggccttcgtgggcgtgttcatagagagcgcttcgtccgttggcgcttggatggatgtcatatccatattcgtcatccccttgggggccctgctcgctgctatcatgtttttctgggtctgtccgaaggggtttgcccgcagccaggttgaactgggtcacggcaaacctatcggcagatggttcgaggttttgaccaagtacgtgttcgtgggaatcactgcgctggtgtacgtgctgggcattttcttcggcggcatagggtaggatgtgcgcagccgggcgggcgttttgcgcggcgcgctaggattttgaggatgggacatgcaagggctatggctgggaaaacgatcgtaaagggcgagcgggcgcaggtttatgcgctcttcgctatcgtcatgcttgccggtgcgttggggaatctctcccaaactgcggtgaacgccatgatgcccgatatccttgcggagtttggaatcgacgtcgggctcggccagtggcttaccaccagctacatgctcgtgctcggcataaccgtacccgttgcgacctttttctcgcgaaggttttcggtgcgccggcacgtgctcgtcgcactggcccttttctgcgcgggagcgctgctcgactcggcggcaacgagcttttggatgctgctttcgggtcgtgttctccaggctgtttcggcgggtttgctcatgcccctcatgcagacgatcgccatgacccgattcccgatggatcgccgatcgacggccatgggcatcgcggggattgcgatggggttcgcccccaacatcggacccaccatcggcggggcgatggtgttctcgttcggatggcgaagcttcttttacttgctgcttgccttgatgctgctgttggtggttgcggctgttctatgcattgcgtcagggcgggctgccgacggcggggcgaagctcgatcttgtttcgctcatgcaatcctcgctcgggttcggcggactgctgctggctttttccaacgcaagcagtttcggtttggctagtgcgctcatctgggtgccgcttgcggtaggcgcgctgttccttgttttgttcgtgcgtcggcaaaagcgcgtcgatgacccgcttatcgacatgagcatcttcgaatcccgccagtttaccagcgggtttatggcgcttaacttcctgcatgcttcgtttatgggcattacgttggtgatacctttgtatatcgaggggctgtgcgggggcacctccctcgatgcgggaatagtgcttctccccggaacgcttgccgcgctgttcctcaatccgatttccggagcgctggttgatcggatagggatcaggcccgtcgtcatggtgtcgggcgtgctgcttgccatcggttcgatcatcatggtgttcgtcgacgaaagcacgccgctgtacatgaccacgattttccaggcgatccgggcgttcggcgtttccgggctcatggcgccgcttatctcatggagtttggccgacctgccgcgcagcaccgttaccgacggaagttcgttttgcatagccgtgcgtcaggcatgcgcatcgctcggcacgtcgacgatggtgttcgctatcacggtcgtttcggcaaccgctgcggcccccgctctcgcataccagattgcgttcgccttttcggcggtatttgcggttttgacgttcgcgtacatcgtcgtgcgcgtgaaatagccgggcggtcgcgttcccgcaaggggattgcgccctgcagcgctgggagccgcgggcggtgcgttcgggcgtgcgtcgcgccttgtctgcatgccgcctcccgtcgagtcgcgtccgccgagcgcgccgctatggtaagctgaggaaaaagagagcgatggacggggtatggaacagcagacggcagataaggtgaaagcgctcggcgcaagcatcgaaccgcagatcgtcgatgatcggcgctactttcatcggcatccggaaccgagtggcagggaatacgcaacctcggatgcgatttgcacaaggctcgatgcgctcggcgtgccgtatcggcgtgtggcggaaacgggcgtgatcgcatctgtctatgggacggcagacttgccggcgaagggggatgagcgctgcatagctcttcgctgcgatatcgacgcgcttcccgtgaccgagcgaacgggtgcgccgtacgagtcggagaatcccggcatgatgcatgcgtgcgggcacgactgccatatcgccatgatgctcggagccgtgcggatcctgcgcgatctcgcctccgagttttcgggcgaagcgcgcattctgttccagccggccgaggagatatccatcggatcgaccaagatgatcgaggcgggtgcgctcgacggcgtcgacaccgtatacggtgcgcatatctggagcgagctcgatgccggtcttttttcctgcgaggcggggcgccgtatggcgcataccgactggtttcgcatcgatatcgaaggtgtgagcgcacacggttccatgccgcataagggcgtcgatgccatcgtcgtgggtgccgagatgatcgatgcgttgcagattctcgtaagccgcgacatctcgccgttcgagccagcagtcgtgacggtgggggaattccacggaggagaggcgcgcaacatcatggccggctccgcttacctcaccggtacggtacgcacatggagcgacgagcttcgccgcgagctgccttcgtgcatcgagcatattgccgaaaaaacggcccatacgttcggcgcggtcgcacgagtgacctacgaagagggcaacgccggactttcaaacgatgtgaagtgcgccaaacgagcccaactggccgtggcggaagtgctgggggcgggagcgctcggcaagtaccgcggcacgctttcgggcgaggatttttcggagtatttgcggcttgtgcccggcgtgttcgtgttcatcggatgcagaaaccccgaggttaaggccaatcatccgcagcacagctgcttttacgaggttgacgagagcgtgttggcgaaaggctcgatggttgccgcgcagtacgctatcgattttctgcagggaaggtaaggagaaggctctcccgggcttcgcttgggatgccggcgccgatgcgtgcaactgcgccggcatcttttttgcgcgaaccgctattccgctacggggctgctcgcacgcttttcctcgcgccgcatgagcgcgcagcagacgatggccgccacgatgaacccgatgcctccgaggatgccgatgggcatggggccgataaacgggtttcctccggaaagcgagaagagggcggcggcgccgacgaatccgttgacggcgccgtggccgatgacagcaggcaggcagcttttcgccttaagggaaagatagctgaacaaggtgccgatcacgatgcagaagatgcacatcgcgaagatgccgagaaacggccagcccggatatcccacaccgtaattatgcccgatcaccgtgagcggcgcatgccacaatccccagatcacaccagtgacgagaacggtcggaacgaacgagagcctctcgttgaccttcggtacgagatacccccgccatccccattcttcgccgaagcaagtcaggcagttgaggacgggggaaagcacgatgcccacgccgatctgcacccaaaggatgatctgcatgatgtcggcgggcagctcggcgccgccttgcgatgcggtcgagctctgcagcagggccattgcggccgacatggttggatcgaaatcactgggaaagatgagaaagtatacggcggcgcctgcgatggtgagggcggccggtccgaaccaggcgatgaggtagtacttgaacgtatgccggaaatcgaccggcttgatcatcgcgttcttgaagccttctttggtgacgagccgcgtgatcagcacgccgattgcgggaacgaacatcatcgatccgatgatgagctgcacggcgacgggcggtgcagccagcgctcctcccatcgccgtgccggttgccaagggcacgacgatgaatatctcgagcgcgtaggtgatggcgaaggtgacggcaagatagatgatgatgcgcttcatggtgatcccctgctttctaaacttgatggagtcgcttgcattactgttctatctgttatagcataaatataacaattaagcatttggcatgcaaggccgaatcggaggaatgcccgagaaagcaagcacgcctcaggtttcggcaagcaagctggaagaagtcgcgcgcctcgtaccctggcggcgccaagacgatggaaagaaggaacgacaatggaagatcgcgtaccggtactcgcagtaagccatttcaccaagacgttcggcgaaaagcgagccgtcgacgatgtgagccttacggtcatgcccggtgatatatacgggttcgtcggccacaacggcgcgggcaagacaacgctcatccgctcgatcgtgggcgttgcgggcttcgacggcggcactatcaacatcgaaggcatgtcggttgtcgaccagcccatcgccgtcaagcggatcacggcgtacgtgcccgacaaccccgatgtctacgattttctcaccggcatccagtacctcgattacatagcggacatcttcgaggtgcctgccgccgttcgtcgcgagcgcatcgagcgctatgccgacaagctttcgctcacgtcggcgctcggcgatctcatctcgtcgtactctcacggcatgaagcagaaggtcgtgctcatcggcgcacttctccacgagccgaaactgctggtgctcgacgagcctttcgtcggcctcgacccggaggcatcctacactctgaaaggactcatgcgggagctgaccgaacggggttcggcgatattcttttcgagccatgtgctcgaagtggtcgaaaagctctgcaacaaggttgccatcatcaaggccggcaagctgatcgccgacggctcgacggagcagatcgtgggcgacaagagcctcgaagacgtgtttctcggattgggaaagtaggcggttttcatgggcaagctcaagctcctgcttaaaatccagattctcggtacgttcggcctcaacaaggcgttccataccgatcgggcgaaggccaagcggtcgatcgcgcttttcgccctcgcggcgatcgccgtcggcgtgctgtgcgtcggttacagcatgggggtcgcgttcagccttgcggagttcggattggtcgatagcgttcccttcgtggcggtgctcgtcggctcgcttgcgggcgcgatggcggcgtttttgaaaaccaacggcgtccttttcgcattcaaggattacgatatcgtgatgtccctcccggtaacgacgatggaggttgtgctgtcgcgccttgccgcgctctatgcgatatcgttgctgttcggcgccgtcgccatgttccccgcgttcggtgtgtacgcatcgtatgcgggggcgacggcgggatcggttgccatgatggtgctctcggtgtttttggctccgcttctgcccatggcgatcgccgttttgcttgcggtgggcatttcggctttggctgcccgcatgcgccatgcaaatatcgtgacggtggttctgtccatcgccgccgttttggtcatcgttgtcgttccctatgcgatgatgggtcaggcgggcggcgacgatgccgcattcgcttcgcttgtggcgcagcagctttcgattatggtgagcgtgctgcctccgatcgcatgggcgagcgagggcatcgcgggtgccaacgtcggtctgttcgccgcattcgctgtggtttcggtcgtgtccgccgtagccgccatagcgctgatctcgaatcggttcgcgactatcaacacgctgctgatggcaagtcgcccgcagggcacgttctcgttcgacgaagggaagcaggcgaaggcaggtgcgcgcaacaagcttcgcacgccgcttgcagcgctgttgtcgaaggaggcggcgcgtctcgtttcaacgccgatctaccttatgaactcttgcatcggctatgtgctcgtgctggttgccgccgcagctgccgcggttgcctctgctctcggcatgcttcccgccgaattgttcgaaggagagattggcccgctcatcggcagttttcttccttgggcgatggcgtttttcgtcggcatttcctctacgacggcggcatcggtttcccttgagggcaaaagcagatggcttatgtacacggctcccgtttcatcgcggacgattcttgctgcaaaggcgctcttgaacctggctatcgcaattcccaccattgtggtcagcggccttctgctttcgttcgccttcggcgtcgatcccgtatcggccgcgctcgtcgtcgtgatccccgtcgccgtttcggtgttcgtttcggtgttcggtcttgccgtcgattcgcgcaggccgcgctacgattggaagagcgaatacgaaccggtgaagcgctcgatcgccgttatggtcaccatgctttcgggtttcgttattgtggcggtcggcatgctggtgacggctttgactggctcgatcggtgctatgattctcccgatcgttttgatcgttgtttcgtggttgctgttcaagagcatcgcatcggcgccgttgcaggaataggggtgagcgcatgatcgtcagaatcgaccagaagtcgaacgagccgctgtatctgcagctgcgttcccagatcatcgcatcgattgccttgggcgatctcgaaccgggcgatgcgctgccctccgtgcgctcgcttgcaagcgatctcggcatcaacttgcatacggtcaacaaggcgtatgcggtgcttcgcgacgagggctatgtggtgatgcgcggccgctcgggcgcctacgtagctgatccggcggaccatgcgcccgcccaaaccgaggcggggcttgtccgcatggacgaggccctgttcgcgctcgccctggaataccgtgcgcacggtggctcggaggaagagttcgttgcgagggctgctgcgcaggccgagcgcgcgtatagggaggagtgctgaatggatgccgcaatggatgttactgtgatgatgggcctgacgatcgttctcgtgccggtcgtcggcgtactcatggcgctcacgccctatctcatgaagaaaagcgagtgcttcaccatcacgattcccgaatcagcggcgagcgacccgtatctcaagggtctcaaaaggcgctatcttgcgctcatgctcgcattgaccgctgcacttacggcggcaggggtggcgcttgtcgttctcgacaacccttcgggtgttttggcggtcgtcattgcgggcacgctgcttacgtgtgtcatcggatatgcgctcatgctgtattttcgcaagaaggtttcgacgtacaaaaagcagcggggatggcgggccgaggcgcaggaggcggttgccgtagtgggggagcgcgacgtccctcgcgccatctcgttcaagtggaacctcctgtacgtgcccgtactgctcgtaacgcttggcgtgggcatcgccggatactcgaacatgcccgacatgatccctatgcaggttgggtttgatggggaagtgagcaggtgggccgataagtcgctgtccatcgtattcatgccggtgctcatccagctgttcatgatcgcatgctttttgttctcgcattggaacattctgcgctccaagcgtttgtccgagccgggagcccctgcgacctcggcgcttgcctacggcatgtttgctcgcgcgcagagcatctacttgctggcgatggggctggtgatctgcattgcgctcatcctcatgccgctttcgttcgcagggctcgttacgcttatgcagagtgcggtcgtcatcatggtcgtatgcatcttcatcgtcgtgggcggcattgccatctccgtcgtgtacgggcaaggcggcgctcgcttgttcgcccgcatgggcgaaagcgaggagattcttgccgacgatgacgagcactggaagttcggcgtgttctacgtcaatcgcgacgatccgagcctgtttttgcctgcgcgcttcggggtgggttggaccttcaactacgcgcgccccgctatctgggccattatggctgcagggctggcgatcaccatcgcgtttgtggttgctgtcatgtcgttcgggtagggcgccgcgatcccttctccgcattgtcttgccgtgcggtggcgtttctgctagtatcgtattacgtgtaatacgataaaggggcatccatggagtccgttttaaccgttcgcttggacgaccgaatgaaagagcagggtatcgccgttatgaagcggtgcgggtacacgccctcggaggcggttcgccggctgttcgactatgcggttaagaacgacgatcttccgttcgacgagcgcgagaagccgagcaaagaggagatcggaaggctcatcgcggcgttcgacgagtgccacaccaagcgtccgatcaacatgaccgacgacgagattcgggaggcaaggttgggggagcgctatggatctggtgctcgataacaacatcgtgctcgatcatatcgggcgacgtgagcccttctacgcactgtcgcgcaaagtatgcctgctcggtatcgtcgaggctgcgaacacctacatcagcgtgaacatgctcacagacatctactatctgctgcgcaaagattacggcagccaaggcgcgcaggacatgatcgagcgtagcctgtcgtttctgcgcctcatcggcatcacgcccgaagatgctgaaaaagcgctcgcgtcccgatgggacgatttcgaggactgccttgttgcgcgctgcgccgaaaagatcggtgcggattacgtcgtcacgagaaacgtgagggattttgccgattcgacggttgaagccgtgacccccgaagagctgttcagccggctcgagaagcaaggcctcgtgttcgaagagatcgaatggtgattcacctaggcgaggtatctgctgctttgatcttcgatatgcgatgcgatcttgcgcatttgcgctagaatggttgggcgcgacgtttagcggcttgctgccgaaaggggattgcgcagcactcgaaaaggaatgtcatgaagctttgcatcggcaacgctctgtgcgaatggaagatgatgagacatcgcgcagggctttcccggtaggatcgatcctaccggttttctcatcggagtcgatttgcgccgcgaacgcgctacgtcttcgcatatgcgatggcgttgcgttcgagcggtgcggcatctccgatggtcgaacctcgaagccgcaggcgagtctcgtctgcggcttttacttttcgaggagagacatgaagacaaaggaacaagacttcacccgcggctccgtgatcaagcagctcgctgccttcacattgccgctgttcgctgccaatattctgcaatactgctatcaggccgccgacatgatcatagtcgggcaggttatggggaacacggggattgtcgccatcggcacggcctccatgatctcgttttgcgtcaatgcgtttgccataggcgtcaccgctgggggaaccgttgcgattgcgaagcgccggggcgcgggcgacgaggcgggtcagcgcacggcttcggccgccgtgttcgcgctcgcggcagcgtgctcgcttgtcgttgcagccggcggactggctttcgcaccgccgctgttcgccgcgctcaacgttcccgcatcatccttcggcgacgcggtttcctacatggcgatcgtctgctcggggtcggttttcacattcggatacaacgccgcctgctcgcttttgcggggcgtcggcgattcacgtggccccctcgccttcgtcgctgcggccacggtggcgaacatcgtgctcgatctcgcgttcgtcatgggattgggctggggtgttgcgggggcggcctgcgctacggtgatcgcgcaggcgctttcctgcgtgctagctgcaaggtatctgatcggacggtacccgagtgcccgtccgcgcttcgagggcgtccgcgtgcttttctccgaacttgcggccgtactcgaggtcggaatcccgtcggcgctccagatggttgtggtgaacgtatcctacctgctcgtaacgggcatgctgaacgcttacggcaccgaggtggcggccgcttcgggtatcgggctcaagatcagcaccttgtcggggttgccatgttgggcgatcggtcaggcggtcacggcgatgacgagccagaacgccggcgctcgaaaacccggtcgcatgcgcgaggccgtcctggcaagctgcggcgtctcggtggcggtaatcgccgtgatcgcgatcgccacgcaggtgttcgcctgcgaccttgcccggttgttcggtgcgtcggatgcggcaactgttgaaatcgcagtgctctacctgcgcatcacgtgttcgttcaatgcggtattctacgcgcttatgtactgcttcgattcgtttgctcttggatcgggcgcgccgcggctggcgctggtcaattcgctgttcgatgcggttgtcataaggttcggtcttgcatggctgctcggttgggcgcttgggttcgggtttgcaggcatctacgttgcgcaagccctttcgcctgtcatcccgacgctcatcggcgtgacgtacttcctgcgagggacatgggcgaaggaggcgcgataacgaacggcaggcggatgctgcggatctcgcccgcctttgcgcggcaatgtttcacgtgaaacatttgttcgtattttggtatactgtgatgagtgttcgaaattcggacggcgatcggagttgtcatgcgaatgcaaagcgaaagccggcctatagcgtctgccgtccaaggcgatggagcaatgagcaagggagaacctgcgatgtctaccgatttgataaccatacctggcgtcgggccgaacatgaaggcgcgcctgcaagccatcggcatttcatgcgtggaggatcttgcgggagccgatcccgaggagctgtatgctcgcgactgcatggtgagcgggggagatgttgaccggtgctgcctgtatgtgtatcgggaggccgtctattttgccgagaccgaacagcccgatcccgagaagctccaatggtgggcgtggaaggactgatggtcttgccgttcagttgatgcttttcttgccatgggccgcgaggatgtcgttgagttcgtcttcgacgatatcgagaagaacctgcttcgatgcgatgccgactttttgatagatatgtttgacatgggtttttgccgtcgtgcttgaaattacgagcgcttcggcgatgtatgtggcactacggccccttgcgagcagcgcaagcacttcgccctctcgctttgtcagcttgtattgctttgacatgctctcgcatgcaaggctaagcgccgtctcggaatcgatggcgggctcttctttgcctcggggcgaaacaggctcttgacgccccatcttgaaaaagtgcatgacgctcaacacgataagggcgaacagggtggcgacgatcatggtcgtgccgatccagtcggcgtcaccctttgcaaggtctctcatgatgccgagccccacgacgacgccgagtttttttgcgagaaaaagcgatgcgcaggcgaagagggcggtgcgtttgaatcggtaaacgaaagggattatccatgtgaggaaaagcacggcaacgtaggtgatgttgagagggatcaccgaaagggcgatcagggcaccgcttaagagcgaagcaacgtagagggtcgcaagagcgatggggagaacgagcaggcgaacagagtcgacggctgcgatgccttggagagagtttctcgcgagaagcagcaggtttcccgcaagaattgcaccaacgcccgcgcaaatttggataatcgtcgaggccgactcgccgtcctgggcttgcagccactgcaagtgtatcgcggaaacgatgaatgagaaaagcgctatggtaaggcatagttgccaaagtggaatcctgtaggatccagggttgctgctgcgtgcgaggggcgcggcttcggacggagcgtcatcgaattcggcgcgctcgttttcgggaagagtctccagccattcgtccgatgcgcgctgtttgcgcactgccaaaaccaggcatgcgcatgaagcgggagtgaggagcaggatcagcgcgcttgcgacttcaaacgatacgaagggaatggctatttgaattgttccagcgatgatgattcctattacgagtgcttgtattgcggctcgcagctttgctcccagaaagaagctcgcaaaggcgatgaaaaggatatatgacgattcgagaacggtcctctgcacgatggtgaagaggtgatcgtgaaccggatgcagcgttgccgatatctgcatggcgaagccgatggtttgcagtaaggctatggcgacaagcatccatgtgctttcatgtggtttgaagctgggctttttggagagcaggatcagcgcggaaaacacggccgtaagggaaacgattttgataagaagcacatcgagggcaccttcgtcggaaatgcgccataaggcactgtacctcagcgcttcggttgaggcgatgcaaagaccgaggcctatgctggccagcgcaaagctgtccttgtcgagagccttctcgatcctttgcgtatcgtttcccatgctgtagcacccaggttctatcaactgccgttgcgatcaagtatagcaaagcgaaaccgacgccttagacgtcggccgattgaggctggatggcgcaggtccatccagcctcataagaagaagcgtttacgaatcgagtttctctaccgcgtttgttccagccagtcgtcccgacgtaaaagcccatccgagcgctactccgccgtattgggcgtaaggctcgagattcgtgtagagtacgcctccgctgtcatttccgcacgcgtacaggccgccgattggcgtgctgccatcggttttaagaacgttgaggttcgtatcgacatcgagtgcggcgatcgttgcgtagggcgttgcatccgctttgatcgcatagtaggggccgtaattgatctgtgagataagggttttctcgcttttgtcgaactcttcgtccttgccgttcttgcagtaaccttcgtatcgttcaacctgcgccacgaaggcatcggcgggaactcctattttctccgcgagttcctcgagcgtatcggctttgaatgcgtaccctttgttttcggcggcttccagaacttcgtagatttgcgggatgggcgttgcctgagggtatccgccttggccgaatacttttgtggaactttggaatttgccatcttcgccgggatatccgttttgggcgagtccgtctacataatcgcttccgtatatggtgaaccagcttgggcctccggcccagaatgcgaacgtaccgctttcgttgtagtgacggatgccgtccgtgcccacctgcagcgcatttccgttgattcccatcatcatgggaatgtcattgagcgaccaggtattttgttcgagcattcgctcttcgaggccatcgcggtaatagcatgggtactcggtgaggtaatcggatgtggtcttgaagtgaatgcagggggacatatcgatattgtaggttcccgccccttgctggatggcggagtcgatcatctgccctttgttctgatacatgccccaaaggtgccaccgtgcggcgagggggtactcggggttttgcaggtatttttcaagcatgtcgccattgccgccgaatccgccggtgcacaagatgacggctttggcattgattatgtattctgttccgtcaacgttgctgcgggcctttaccccctttaccgagctccccgaatcgtcaaggatgagctcgtatgcctgcgtctcgagaagatactcgccgccgagcgcttcgaagtcggcaatgatgcggtcgtagtattgccccactgaagtggatcggtcgccgaaggtgtaatcagggtattcggctgcgtaatcctttccttcgtcttggttcgagagatagatgtattgctgcttgcacagccatgtgctggtgccgaaacccttcttggcattgctgaacacgaatccatggtcgaattggagccagtcgaccgttttccccgattcgtccataaggagctttacgcattctggtttgcagggcgtgcctttcgagtagttcgccatccagtcgtcatacaggctgtcgtaatcgcaccacgcttcgccgttgttgtatttctcgatatagcgaggggcgtttatgctgaagggctctcccgcattcgaggcggtgccgccgtatttgcctgccgtttctattgccaagacgctgacctctttgcctgcttggaccatcgcttcggctgcagccatcgccgccgaggagcctgccccgccgagtccgcatacgacgatgtcgtagtcgagcgttttctcgtcggatgactgctcgagcggtttatagaagttatgaatagctgtaccgttcgatccgcctgcggcaagggctttgatgagtgcgcgttccgtagccgttttgatgcccgcgcttacgctcgttgcgccggtgatcgagtcgatcgtaacggattgcgtttcgatcatgcggggggatgagaaggtcttcggctgccttcataatgaggggctcttctcggttaagcttcttgtcgataacttcgatgcttttgaagcttgattcgtcgactgactattgcagcgcttttgctacaccgttccacgctccactgctacagcgctccatggcagactgccacaccctaacaatctaaattgccacgcgccccgaaaggggcgcttccttttccgccacaattccgatgggcacaaaagtgcccatcggaccattgcgagaaaggaagaaaaaatggtcaagtacagagaaatacttcggcaaagggcgatgggggtgagtgtcaggaacacagcgttctcgtgcaggtgctccaccgcaacggtaagggcggtgaccacccgcgcgaaggcgcacggcctcgagtggcccttgccggaggagatgaacgatgcggcgattcgagccgtcatctatccggcaaaggagcgatccgatatgtcgaaggcggagatcgaccatccccgcatcgacaaggagatgaaccgtcccggcatgaccatgctgacgctttggagggagtactgcgaggacgccctggcatcgggcatggaaccctacctgtactccgccttctgccagaagcaccgcgcctgggcggccgccaacaaggtctccatgcgcatcgagcgcaaacccgcccaggagatgcaggtcgactacgtcggcgacaccatggaggtgctcgacgccgacaccggcgaggcgcgcaaagtctacgtcttcgtggcgtgcttgccctattcgggcgagatgttcgccgagggcgcctacaacatgagagcggagtcctgggtcgaggcccacgtccacgccttcgccttcttcggcggcagcgtgccgatagtggttcccgacaacctcaagcagggcgtcgtcaagaacaccgtcgaagagctcgtgatcaacgagcagtaccgcaggatggccgagtactacgggtgcgccgtcgtgcccgcgcgccccaggaggccgagggacaagggggcggtggagatgagcgtgagggtcatcgagcagcgcgccatcgcgccccttcgcaaccagctgttcacctctctccggcagctgaacgaggctcttttggagaaggtgcgcgagatcaacgcccgtccgttccagaagcgcgagggcagcagggatgaggtcttcgtccgccaagagaagccgctgctcatcccgctgccgggcaagccctacgagatggttacccgcaaggttgtcactgttaattttaactaccacgtctcgtttgacggatgctggtactcggttccgttcagctacgtcaagcgcgaggtggagctatgcgccaccagatccgctgtttgggtggcctgcgacggcgagcgaatcgccatgcacgagcgcatctacggccctaggggaagctaccgcaccaaccccgaccacatgcccgattcccatcgcgactttgtggagtgggacgcgaagcgcttccgtaaatgggcggccgggatcggcccgtcctgcggggaagccgtcgatgccatcttgaggtcgcgcaagatcgagcagcagtcctaccgctcgtgccgcgcggtgctggcgctcgcgaagaagcacggaagggagatgctcgagcaggcgtgcgccaaggcctgctctctaacgcccaggccgagctacaagacgatcaaatcgattatctcggagatgggggccgcagggcccgaggaccaaaacgccggagcgtatctgcgcggaggcgactactaccggaacttgagcgagggggacgatgaataatgacggcgagccagacgacgatggacaaactctatggcatgaggatgtcggtgatggcgcaagcgtatcgcgaccaggaggaatcgcaaggagtggcagagatgaccttcgacgagaggttcgccatgatagtcgatgccgaatgggacgcgcgccgcatcaacaggaggacgaggctgttgcgccaggccggcttctccgatcccgaggcgaacattgccgatgtccgctacgacgcggatcgcaagctcgaccgcacgaaactgatagagctgtccaactgcacatggataagaggccaccgcaacgtcgtgatcacgggcgcgtcgggcgccggcaagagctggattgcctgcgcgctcggggtggcggcctgcaacgccttcttcagcgtaaggtacgtccggttgcccgaaatgctcgacgagctgaacgtgagcaagaacgaggattggctcaaggcgaagaagcgctacacgaaatgcgacttgctgatactggacgattggcttttggaaaagctcgaggggaaggcggcgcgcgagcttttagagatagtcgaggcgcgcttgcgcagcgggtccttattgatttgctcgcagttctcgccagcaggctggcattcaaagctcggggaaggagcaatcgcagatgccgtcatcgaccgcatagtctatcggtcggacgtcatccatattgaaggcgacgagtcaatgcgcaagcgcatcggctaagagcataaccggccgtattggccaagaggggcgcttgcgcgcccctcgcaatcagagcaacccgcattgctacgtggcagtctgccatggaacgctgtagcagtggagcgtggaacggtgtagcaaaaacggcgcaataagcatcgacttcgattttaacccgtacgggttcgatccagtcgaatccgtacgcttcgccgacgtagatccccggcttcatcgccacatccccggtctcttctaggaggcctgcttgctggaggcattcctctgcggctctgaaaatcgctctgcttgtcgtcgttgctccggaaaccgaatcgatgccatcgaggctgcctgcctcggcgattttctcggagaggatctgtgccgccttccctcccttttccggcgtttctcccatgtcggcgatgtctgctttggcgattcttccatcttcgatggtcagtttcacggtaacgtcgccgtggaatcccttggacgaagcgctgaatgtcccgctttctccccgagctgtttcgctgtcagtcgagcagccgctgaggataccgcctgcggtggccatgccggctccgacggcaaggctcaatgccgtacctttcaaaaaacttcgcctgttgatgttcgttgtcatacaccctccttgtcaatgaatccgaagaaacaaagcgagtctagaaaacgccgcagaaagcgtcgtcctcacaaaaggaggatattgatatagttccagttcaagaagctaaatcccgcgcacttcgacgtttgggacgatttcttggagcgatgtcgaaaagcttctcagctcctcgggcgaatagccgtgcaaaatgttttcgcctgcaagcacggtatccgaatcgacgaaaccctggagaaaccatgcgggcgtgccctctatccatcgggcgagttcgcgcaggcgtgcttcattatggtattcgcgcacgacggtggttcggaattcgaacggcacggtccccgaaagcaggtaggcgacgctctgtgcgacgggcgaaacgtcgaagccaggcctgccaacggtctcggcgtagcatgcaggagcattcttgacgtccatggcaacgcaatcgaccagattcgcctcgacaagctccgccaatcgattcggaaagctcccgttcgtatcgagcttgattgcgaacccgcgttgcttgatggcttcgcagaatgcggcgatgtcgggctgcagcaggggttctcctcccgtgatgcagacgccgtcgagcaagccttggcgcttatcgagaaaagagaagaactcctcttcggagacattgggaaaatccgcttccgatcctttgccgcagccgatcacgagttcggcgttgtggcagaacgggcagcggaagttgcatccggggagaaacaccgtcgcggccgtctttcccggataatcgagaagggtgagtttttgaagtcctgcaagtttcataatccctcgattgtagcaccgcccgcccgttttcgctcccggtgccgacaccgacttcgggggaggcacgtccagttgccttccggtgcccgccggcttacctgcggcgcctgtgggagcgcaggtcggatcgcctgcccccttagcgctcgcccatgcattcaccaacgagatcgataagttcttgcttcgaatgaatccccatttttctgtacaggctcttgacgtgggtctgtgccgtgctagtcgaaatgtacatcgtttcagcaacttttttgaggctgtttccttgagaaaactccagcatgacttcggcttcgcgtgcggtaaggccgtgctcttctgcgagggccgtacatgcggcttcgcgtgaaagacggtttgccgtcggtagctcggcaagctttctgttggccaagagggcgaggaagacgatggtgctcgccacaagtataaatgcaatcaaaagcgcgaaggcgggaagataggttgcaatgggcaggtcgatcgttcttgctatttcgggcgcaacgaagtagctgcaaaatccagagacgcattcaacgagcacgaaaagcgatccgacgaccgatacgagcgagagtcgtttttctcttacagcgaggatgagggcaacccaaaggaagaaggatacaaaagtgcgtcccgaaatagccactccgcttgctagctcgggcatggccggataaagggcgccaataaggaacaggccgcagaaaaagaccagcgcgacgagtgtccaaagccagaagaaaagaggcctgcccgtatcggctctgtaggcaatgcagacgatgatgagcgatagggcaagcgatattgcccgtcttgaatacgttccttgctcgggcgaataagagattgttccgaagtaaaggaacccccttattatggcgccgattacgagaaaggcgatcaggagaatgacgaggccggacagcgcactccttacggacccttgagcgttttgcgaatagtcgggcctcgtgcgaggtggctggtaggcggtatatgcagctcctgagaccatccaggaaagaaacggcaaagcaagggaaacgggattgggaaggagacttgtcagcgacaggataaagcttaaaaaaaacgacatggcgatgttgaggaacatgttgcgttcgcaagatcttgccgcttcaagggaccatgcaaacgtaatgacgacaaaacccgatgccgataggaaggttccagcgaatgaaaagccccaaggcagatcgaagaggccgcaaaaataggtaagcgaaatgccggcggacgctaaaacgccaaatccgaaaacgacaatccgcttggacccgagtatcctatcgacaatcgaatttctgagaaggcaagcgctgcatacgacagctacaagtccaaggaacagcaggtattcaacatcgaattgtgcgttgccgccgttttcggcgaaaactagcccgaagaagctgtttcgaaaagccggccaataacatgcgagccctatgatgaacagccaatcgttggcgcttggcattcgaagtactcttttggtcaatactccccctgttgcatcgatgttgagtcgatgcaacggattatacatcagggctcccggcttgggctttctgcgctgcggcaaaacagtggcatgggctcccatatgcgaaaaataccctgttttatggtcatgcaagaagccgcttcgcgtcttttacgcgaagcggcgcagaggcttggatgggatccttttaccacgctgtgcgctcgttcagctgataggcaatgcatgaataaggaaaggggtatgcaatgagcatagacagacgcggttttttgaaaggcggattggcgttgggggctgctgctgcgcttggaggaagtttggcggggtgcgcttcagctccggcgggcgaagcgaaggcgcaggatggcgttgagtatcctgcgggaacaaccgccgacgacttcgagaactcaagtgctgtggccgagccgataacggaattcgtagaggagaaaacctatgatatcgttgtggtaggggccggtacttcgggattgcccgccgtcctaacggcaatcgaggagggcgcaaccgtcgcgtgcctccagaaggaatccacggcgatttctcaaggcaacggttcttcgggtgtcattcttgacgaaacgaccgacatgggtttgcttcgttgggtgcagggctatcgagaggcatgcagctaccgtgtgaacctcgacctcgtgaatttctttgcacggcattccggggagacggcaatgtggatggcgcgtatggggaaagaggctggataccccccttacgagtcgaagctcacaagaaccgaaacggctgatggaagctatgtgaccaccatgcgcaacgcctttggcgttaagcctgaaaacaatggcaatttaatcaaggcccttgcagagtacgcggaaggaaagggcgccgaatttttctacagcacaccaggcgtccaactcgttaaagatggcgaacgggtgacggctgtaatcggcgaaagcccagacggctatgtcaagttcaatgcgaataaagccgttattctggctacgggcgactaccagaacaacgatagcatgcttgcgaagtacgcacccgatctcgttcgctttacgaaaaaacagatgaataagacgggggacgggatcctcatggcaatggctgttggcgctacgatgacgccggttggccacagcaagcagatgcacgatatggatgcggctccaatggcgatgacggggattccattccttgcagtcgacgagcagggcgagcgtttcatgaacgaggaaattcccatgcactattgggatgccacccttcggtattcagatgcggatgacccgggcaaattctgccgcattttcgacaataactattttgccaccgccaaagagtgggggtatgctccgtcaccggtcgaagtaatggaaaactacattccgggcgctgtcgagaatcccacaggcgttatgaaggatctcatcgatacgcatcgatgcgatacgctcgacgagctggctggggagcttggaataccggcagatgcactgaagaaaaccgtcgagcgctacaatcacctttgcgaaaccggcttcgatgaggatttcggcaagcagagtaagttcatggttccgatcgtcgagcctccgttttgggggattcatcagtggattagacttactgccatgggaggcggaatcgccgtcgacaagaactaccaagtggtcgatcaagccggcacgccgattcccggcttgtatgcggtcggtttcggtgccggcgacatatgcggagacgtcgactggtcgctctacctgggcggcatgtcctgtggatcgtgcatgacttctggccgctacgcgaccattcatgccttgacgggcgacctggtgccaagcagcccgtcgggcgactgggaagggttccgcgccgagttcgtcgatgtcgattagggatctgacgtttgatctcgcctagatcctgtaagagcaggatgtcctgagagaggagttgggctgcgacccaaaacttggacgggtcaaaaaaactaggcagctaaggactgattccggaactcctccggggtcagtcctttcggtttaacctgccctccttagcgctcgcccatgcatttgctggcaggattatctcttatatgtaagatgatttccgatgcttccccaagcaagggttgaaggtaggcgtttgcgtgcgatgggatgctgggtggcggaagcgtcgttgtgggcgtgcgggcctggcgaagcgttgtgaaagatgcgtttagcggactgcccgcgtatgttgacgctatgttgataaaactacatagcaattacggaaagtacaacatatagttgccgtctgcgtaaaagaatctagatatggtgaggtttccgttgacttgcggggggtgcgggactaggatactggtacttcgaacagcaatcgcatcagaatatcaaaggagcagatctatgtatcaggtgaggaaacgtgacggcaaaatcgctgacttcgacattgcgaaaatttcggaggcgattgccaaagcgttcgacgcgttggataagcagtaccatccttccaccatcgatttgctcgcgctcaacgtaaccgctcatttcgagccgaagatcgaaaaaggcatcatcgatgtcgaggccatccaagacagcgtcgaggaagtgctttcaacggccgggtacgccgatgttgccaaggcctacattctgtatcggcagcaacgcgaaaaggtgcgcaacgcgaacgccacgctgctcgactacaaggccatcgtcgacagctacgtcaacgtcgaagactggcgtgtgaaggaaaactccaccgtcacctattccgtcggcgggctgatcctgtccaactcgggtgcgatcacggctaattactggctctccgaaatctacgatcgcgaaatcgccgaggcgcatcgctgcgccgacatccatctgcacgatctgtcgatgctcacgggctactgcgcaggctggtcgctcaagcagcttatccaggaagggcttggcggcgtgtccggcaagatcacatcgaagcccgcaagccacctttcgagcttgtgcaaccagatggtcaacttcctcggcatcatgcagaacgagtgggccggcgcccaggcgttttcgagtttcgatacgtacctcgctccgttcgtgaaggccgatggcctcacgtacgaagaaaccaagcagtgcatcgagtcgttcgtgttcggcgtgaacactccgagccgctggggcacccaagcgccgttctcgaacatcacgctcgattggaccgtgcctgccgatatgaaggatgtgcccgccatcgtgggcggcaaggacatggatttcacctacggcgattgcaaacccgagatggatatggtgaacaaggcgttcatcgagatcatgatcgagggcgatgcgaacggccgcggattccagtatccgattcccacctattcgatcacgaacgatttcgattggtccgagacggagaacaatcgcttgctgttcgagatgacttcgaaatacggtactccgtacttctcgaactacatcaattccgatatggaaccctccgacgtgcgttcgatgtgctgccgcctgcgtctcgatctgcgcgagttgcgcaagaaatcgggcggcttcttcggaagcggcgaatcgaccggatcgatcggcgtcgtgaccatcaacatgccgcgcgtcgcctatcaggcaaccgacgaagccgatttctacaagcgtctcgatcacctcatggatctttcggcgcgttcgcttaagacgaagcgcaccgtcatcacgaagcttctcgacgcggggctctacccctacaccaagcgctacctcggcacgttcgagaaccacttctcgacgatcgggcttgtgggtatgaacgaggcgtgtatgaatgcgaagtggctgcgtgccgacatgacgcagaaatccgctcaggaattcacgaagaacgtgctcaaccacatgcgcgaccgcctctccgactatcaggagcagtacggcgatctgtacaacctcgaggcgacgcctgccgaaagtaccacctatcgtttcgccaagcatgacaaggagcagttccccgatatcatcaccgcgaacgagaacggcaagccgtactacacgaattcgtctcacctgcccgtaggctataccgaggatattttcagcgcgctcgacgttcaggacgagctgcagacgctctacacctcgggcacggtgttccacgcgtttcttggcgagaagctgcccgattggagagctgcggcgaacctggtgcgcaagattgccgaaaactacaagctgccgtattacaccatgtcgcctacctattcggtgtgcaagaaccacggatacattgccggcgaggtatacgagtgtccgtgctgccacgaagagacggaggtgtacagccgcatcaccggttactaccgcccggtcaagaactggaacgacggcaaatcgcaggaattcgaggatcgcgtggtctataacatcggtacgtcgaaactcgtgaagggcgatgccgaagcggccgcgaaggctgcggcaagcggggaggctgcggtgtccgagcgcggaggtgaagcagttgccgtgcccgcaggcggcgctgttgcggctggcgaagcggccgtagtcgaatcgacgacccttcccgcgggcatctacatggttgccactaagacgtgcgcgaactgcaagcatgccgagcagcttatggacgaggcgggcattgcgttcgagaagatattcgccgaagagaaccccgagctcgcacgccgctacaacatcatgcaggcgcctgcgctgctcgaagtaagcggcgacggcacggctgccgtcgtgcgcggtgcagccgctgtattccaggaaatcccgaacctgaaggtgcttgcgtagccgcaggtccctttcatcgacggggggggttctcgaagcgtacatgcttcgagaaccccccgttcggcgcgatggccggtctttctcctagtcctctagatgcgaaagcttcgtcccaacgatgcgttcgaccgattcgtcgatgcgcgattccgcgacgcgcccgtcgttgaccgcatcgattacgccctggtaggcagcggggaattcggagggcatgagcactatgtcgacacccgcttcgattgcggcgacacctgcctggtcggccgtgcagaactcgccgatagcccccatttccatggcatcggtgatgatgatgcccgtgtagccgagttcgttgcgcaaaagatcggtaacgacggccgaattgatggatgcgggcgcgtcggtgcccagcgctgttggaagcgagaggtgtccgaccatgacgaacggcacgtctgctgcaatggccgcctcgaagggcttgagctcccatgtgcgcagttcgtcgagcgtcttgttcgatacgatggccccctcgtggctgtctcccatgactccgccgatgccggggaagtgcttggcgcagcagaggatccctgcgcttccgaagccttcgacctgcgcctgcaccatgctggctacgaggtcggggtcggtgccgaacgaacgctgcgccatgacatcggtctgcggatccccgcatatatcggaatcgggtgcgaaatcgaggttgaagccaagctcgcttaaatacgacccgatggtcgttgccgcctcgcaggcctgcgaggcatcgcccgtcgccccgattgccgccatatcgcccgcgtcctcaacgtcgaagccaggatttcccgcgatgcgcctgacggtaccgccctcttcgtcgacggctatgaagaggggaagccccgtctcctccttcgcgtaggcttgggtattggcgatcatggttttggtttggtcggggtcgatgaggtttttctggaagtagacgatgccgccaaccgggtaggcgccaagcgcgctttcggttgccgggcccgcctgggtcgctgtgtctactcccgtgatcatttcgggggttacgatgaacatctgcgcgactttctcctcgagcgtcatggcggaaacgatttcggcgacctggtcttcaagagtcggttcaggctcaggctcgggggcgctcggtgtcgcttcgggctcgggtttcttcggagcctcggttttcgcgctgggagaatcgctcgacccaccgatgccgtcggggacggttgcgggggagcagccggcgaaaatcgcaaggcaggcaaggagcatgccgagtgcgaacagggggatgcgggagcgtttgagtctcgtttcccgtgcgatagcagtggcgcgcatgcgaaagagccgcctttcttctgggtttccacgaaatgcgcgctttagtatagagcgccgaagcggtctcgctcgatttacgcggcgtgattcaagctacggttgcgccacgctgtcctcgccgtttcgggtcgtgcgctcttcttgccagctcgcccgaccccgctctatcatcttcggcatccaagccatgacgagcaggcagatggcagccagagcgatgcagattccgaaaacggacggcgccgaaccgatgctgcttgctccgaccgctgcgccgcacgctgccgtccagatggttccgccgaacccgcggaagaacagcgccatcgatgtcgccttgccgatgttgtgcggttcggcgcccgtttgggcggcgatgtttccgagcggcatgctcatgccgatgccgaatccgaaaacggcggatgaaaccgctatctgcaccacgcttgtttcggcgttgacgaagccgagagccagcgacccgagccccatgaccatgaaggcggtgcgggagagcgcgcgcatgcgtccggttttgccgaacagcctgccggaggtgttgctgccgatgatcagggcaagcgtcatggggatcgtcgcgtaggcggattcggcggagcttaagccgagcacctcttgggcgaaacgggggatgaacatgattcccgcgagcaggaggaattgcgctccgaagctgaggacgaaggatgccgaaacctgcttgcgggcaaacagccgcacgggaacgatgggcttttccctgttcttttcaatcgctacgagcagcgctgcaagcaccgcggcggcaacgagaaggccgaaaaacggagccgaccaccaggtgaacaggtcgcccgtgaggctgaatgcaagcacgagcggcacgacggttgcggaggcgaggatcgaaccccgcacatcgaggcgcgattccgatcgggcgcttgtgccgggcagaaaccttgtcacgagcacaagcgctgcgacgcttatcggaagattgacgaggaatatccaatgccagcccacggtgtcggctatgagtccgccgacgagcggccccgcaacgcttgccaggccgtacattgatgagatcgcgcccatgtacttgccgcgctcgcgcggttcgaacaattcggcaatcgtgatgaacacgcccgattccacgaatccgcctccgatgccttgtacggcgcgcatcgccgcgagcgcttcgatcgaatttgccaaagcgcatccaagcgaagctccggcgaagacgaggatgccgatgacgaacatcttcttgtggcctatgcgcgccgcgatgccgccgcagagcagcgtggcaatcgtgcaggtgaggaggtaggaggtgaacggccacgtgtatcggccgaatccagaaagcgccgaggctatcttgggcatggcggtgctcaccaccgttgcatcgagtgctgcgatgaacaggctcagcatcagccctacgatgacgccggccgatgctcttttcgttcgttgatccatttgatctccaatctacttactgtgaaagtactatcagtgatagttaatgggcaaaaacaaaccgggcgaacccggtacgtttttcaggaaggcgatgcgcggtgaaagcgcgatcgtcgcgcggcggctaatccgcggcggctttctttccgccatcgtagaattcccgctcgtattcttcgagccagtcggctacaagccgatatgttcgcgcgcagagatccatcgtcgctcgggcttcgagccgatcgtagtcgggaatcatcccctcgacgcgctcggcggtagcacggtgcgactcgataagctcggcaatgagctcgcggccttcggtttcgccgatccaacagaggttcgccgtaacgggcagaaacccgtagtcgacgcgtgccggctgcgcagcggttctgtgcatgagctcgtggaggcgctctttgcccttttcggtgatggagtagatggtcttttcgggcatctcgccctctttgaccactttgccatcggcgcatccctcttcgtagagcctgatgagattgcggtacaccgaaggggggctgatgcgtatccagcgccgcacgttgcggatatccatttccttgtccatctcgtaggcgctcatcgggcgatccatgagcgcgccgaggatcatgagttctatcgattcgcttgccattgcagcctcctgtcgcagcaaatactatcactgatagtatttgagtcaagcccctttctgatgtccttccgatcttcgctatcggcaacggctggttgcgaaatgcgcatagcgaaagcggaaaagttaactttagcttccattttgccgctacatggtctatgatacggttgttaaatggagctaacatcgtgaggtgcattgttatgcaggagaccatggcagcaaacggcagcatgacggccgtacatgaatcgcccagcgtcggccgggctcaaatgcctctttcgtttttgggcagaggccgatcagccaccatcgccaaagtgcgcggcaagggagatctgcaccatcatctcgagaacctcgggttcgtcgaaggtgccgaggtttcggtggtgtccgagatggggggcaacctgatcgtcgagatcaagggttcgcaggtcgctttgaacaagcaggtcgcaacgcgcatcatcacgcaatagcatgaaacatccggggttgcgggtcgaacggcgggcgttggcttggcgggcggcagatggctccggtcgaaaatacggatggcaagaaaggtaggaagcatggcagaagctgctggggaaaagaccctgcgcgatgtgaagatcggccagtcggccgtcgtccgcaagcttacgggcgaaggtgctttgaagcgccatatcatggatatgggcatcacgaagggtactgatgtgtacgttcgcaaagtcgcacctttgggcgacccgatcgaggttacggtacggggctacgaactttcgcttcgcaagagcgaagcagagagcattctcgtcagctagggttgcgcccggccgttcggttcgggcgagggcggcatcgggtcgccgagcgagcttttcacagctgaggcaacgggctggaagagcattttttgggatatgagttagcaaaggttaacttaaacgggcgggcaaccgcacggcggcgaaggatcgcgccgcatgagaaggaaaggcagaacatgggaattcgcatagcgcttgccggcaatccgaattgtggcaagactacgatgttcaacgacctgaccggtgccaatcagtacgtcggcaactggccgggagtgaccgttgagaaaaaggaaggcaaatacacacgcgacaaagacgtgaccatcacggacttgccgggtgtctattctctttcgccgtattctcccgaagagatcgtcacacgggactatctgcttgacggacgccccgacgtggttatcaacctcgtcgatgcgacgaacctcgagcgcaatctgtacctgaccacgcagattctcgatctgggtcttccggtggttattgcgctcaacatgatggatctggttaagaagaacggcgacaagatcgatgtcgccaagctttccaagacgcttggatgccctgtcgtcgaaacatcggcgctcaagggcacgggcatgcaagacctgctcgacaccgctatcaaagcgggaaaggcgggcaagcccgccgcttcggaattgcgctacgacgattcggttgaggcggcgctttctgagatttcgagcataatcgaaggcagagtgcccgcagagacgcttcgctggtatgcgaccaagctgttcgaaggcgaggagcgaaccatcacgggcctcaaactctcttcgtccgatatcgaggcgatcggcgccgtgcgcgatcgcgtcgaggaagccgaggacgatgatgccgaaagcatcatcacctccgaacgctacgattcgatcgtcggacttgtttcgtcggcggtcaaggtttctcgcaagggaatgaacaccacccagaaggttgaccgcgtcgtcaccaaccgctggctgggcctgcccatcttcgccgttatcatgttccttgtgtactacctggccatatcggtcggtaccggcgttgtcaccgactgggcgaacgacggcatatccggagacggctggctctataccggtggtgcagcctacgaagaggccctcggcgtgtgggaagaggaaggggtcggcgaggaacccgatccggctgagttcggcctgttcgttcccggattgaccccggtcgtctccgatgccctttcagcggtcggcgccgcgccgtggctgcagagcctcgtcgtggacggcatcatcgccggcgtcggcgccgtcatcggcttcattccgcagatgatcatcctgttcttgctgctctcgattctcgaggcctgcggatacatggcgcgcgtcgcattcatcatggaccgcatcttccgcaagttcggcctatcgggcaagagcttcatcccgatgctcatcgcttcgggttgcggcgtgcccgccgtcatggccacgaagaccatcgagaacgagaaagaccgccgcatgaccatcatgacgacgacgatgattccctgcggtgccaaaatgcccattatcgcgctcgtgttcggtgctcttgccggtggcaacaccgagacaacctggtggatcgctccgatgttctacttcctcggcgtaatcgcgatcatcatttcgggtatcatgctcaagaaaaccaagatgttcgcaggcgaggcgagcccgtttgtcatggagcttccgcagtaccatatcccggctgccaagactgtgcttctcgccacatgggagcgcatcaagagctacatcgtcaaagccggtaccatcatcttcctgtccaccatcgtaatctggttcctcatgaacttcggcgtgtacaacggccagttcggcctgctcgatcccgagatggacggctacatccagtacagcctcatggccggcctcggcaacggccttgcgtggatcttcgcgccgctcgggttcggcaactgggaatcgaccgtcacctccgtcaccggcctcgtggcgaaggagaacgtcgtggcaaccgtaggcatcctgacgagccttggagacgtgggcgagtccgacccgtcgatgtggagcgcgttcgccctcatgctcggtggctccgctcctgcgatcatcgccttctgcgcgttcaacctgctgtgcgcgccgtgcttcgccgccatcggcacgatccgtcgccagatggaaagcgccaagtggacctggttcgccatcggctacatgacggtgttcggctgggtcgtcggattgatgctctaccagttcggcgggcttatcaccggcgagcttgcgttcaacgtgtggacggtcgtggcggcggtgtgcctggttgcgattctgttccagctgttccgtccgatgccgaactacgacaagaagaacgcgaagaagcttgcagccgaaggcagtgcggcgtaaggcagccgatgccggtgcaaagacagttgcatcgcgtgtgcaatcaccgaaacacacctggctcgcccttcgctgcgggctgggtcgactgaacgagaaagggggcctgctatgcagccgatgatgcttaacttcccgaccgctatcatcacgttggcgatcatcgcgcttggggtcctcgccgtacgccgtatggcgagacgcgggctgtgcgattgccatgacggcgaatgctctgggcacggatgctcgggatgcggcgccgtcgataagatggtcgccgatatggaacgtgcagccgacgctcgcaagtagcgcggaagcgctttggagcgtgacggttgaaagaagggtcggagaccaacggatctccgacccttctcgttgcgggagggcgaatgcggaaagaatcgatcaggtacgttgccgcgctcgtccgaagttgcgtatcttaggcggtcgcctcttccttcgcggcgttttggcccgcaatccgacccattgtcatggcgcacagcacggtggcgccggctgcgcagttccattcgcatgcgacgcccgctgcgtacagtcccggcacggtcgaggtggcaacgccgtcttggtcgggtgccgtgagcttgagcgcctgggcttgcgtgttcgttttgatgccgcccgtggttaccgaagtgcttaccgcgactgtggcggcgtagaacggccctgtcatggggatgaggaattcagcggggcgcccgaagtcttcatctttgccggcttcgcagaaaccgttgtaccgatcgacggtcgcccttacgctcgccctatcgaggccgaccagctcggcgacctcctctaccgtgtcggctttcgcccaattcagctcgcgcaccgcgagcacggcttcgagttcgggagtagtcggaaggagcacgacgaccggcttgccctgttcgttctgcttgcgaacgatggcgcgatgcccggtcgggtcctcgtaaggcgtctcctcgttgaagaaccgctctccgttcgcgtcgagccacaggccgtgcaggcgctcggagtaattcaggttgacgatggagcccgtttcgagcccggcgagcgaactcatgagcggcatgtccgaaacccgcgtcgtgtaggctccgaaatccatggccatgaccaggccgtcgccggttactccggggctcgagccgggcaagatgttcgcgcactcggcgttcagcgcggcgatcatggcggcgctgcccgaatggccgcctgtggccagaatcacgcccttgcgcgccttgatggcgagatcgcctttcttcgacgaggcggcgatgccgatgacccggccgttttcgtcggacagaagctccgtcgctgcggtttccgtcatcgtcgaaacgcctgcatcctcagcgacctgggcgaggactctgatcatttccgctcccttgccgtcgacttggtggatgaccggcagctcggtgtagccgaatcggggtgccacttcgtcgacgaacggcacgccgatttcctggagccaatcgatggtttcgccgcttttgtcggcgtacagccgtgcgatctcggcgtctttcggcccgtaccattcgggatggcccatgaaccagccgtacacttcgtcggcggtgaccgacaccccctgggcggcggcgagcttcgtgccccagcctccgaggatgccgtcgcacagcgtcgaatcaccgccgatgatattggtcttttcgagcatcaacacgcttgctccgccgtttgccgcctcgatggccgccgcgtatccggcaccgcccgtgccgactactaccacgtcgacctcttcgtcccacgtttgcgccgtcgttgcgccttcggtcgtctcaggcgagctgcatccggctaaaaacgaagatgcggcgacgcccatggtgccgaccaatgcggctccgacgaatcctctgcgcgagatcctcttttcatcaagcatgattttccctttcccttgctatcccttttcggaccttcgtcccgatcaaagggtagggggcgtgtataataggtgtcaatatctaaaaaattgataattaatgcttggatctctgtgcccgccacttagggaattcagataataaaataccagttcatcattcatgttgataggtttttcgcgacggacaatttgcttgtaggaaataaattattcgaatatcagtttttgatagtataaaaacatagcgaaaagaggccggtcgatgacgaacgaaaccgtagagcagatgatcgccctgctgaaaactcccgaactgtgcgacttgaggcgtttggccgacgagcatcccttgccgtgggccgagttcgtcaagctgaaagagccggctggcatcacgcagggccaggcatgggacattctgaacacgcttcgtcgccaaacggctatcgagctgccgtttcgcgacggcgagggccgctgcggatggtactatccgacgcgttcgatagaggcggaccttgatgaaatcgacaagcggtgccatgcgggttcgctgctcgatctggcgatcaaatcccgcaatacgacttactttctcatcgaagcccacgtggccgatgccattacgatcgtgcaggaagacgggctggccatcggatatgaaaaggcgcgtgaggtcctcttgggcgaacgcgaacccgagaattcgggagagcggcttttgctgaacgggcatcaagccatatgggacctcgacgactacgccgaaagaccctgcacgccagagctgatcttcgagatgtacgaaaagatatcgaagggcgtcgacgatcagaccaccccctcgcgggtgcagcagtcgctgaactggaagcgaaaacggctcgacagcttggcggcgctgtcgctggtcgcaaaactggtggaagagaacagggagggatacgacgaacatcctctgttgctcggaatggccgttcgccatatcatcatgagcacgctgccgctgccgtcgtggaacggcaccatgtattcgctgttgatgaagctgctgttcaagaaatcgcacctgccggtgctcgccttcgttcccctcgtcaagacgtgccgggagtgggagagcggcatcctccgtcccccgagcgtgatggcttcccttgccgattcggaggtgcttatcggcaacgaggtcgactacacgatctacgtcggcgtgatggcgcatctggctcggcaaaggctcgacgaggtcgaaaacgagctgaagcgcgttatcaaacgcgacgaggcgttcgtgcaggcgctacgcgatgatgtcgagatcaatcataggcagcgagccgttctccaggttgcgctgagcaatcccgaggcggtcttcaaaatcgaatcgcatcagatgatgcacaaggttgcgtatgcgacggcgcgggcggaccttctgaagcttgcggagctcggatttttgcgatgcgtgcgctcgaggcgcgcattcgagttccgcgtgactcccggtcttcggcagctgctcatggaccacgcgaaagacgaggaatcctaagcggcgggattgcgggcaagggcgccgcgcttgcggcgaggtcgcattgtgtcgttgcggcatggggttcgccgccgctgtcctttttttgcgactacggagcaactccgagttgtggaggaattgtaaacctaggtgaacttccattgcccttatcagtaagttaacctatactaacatcatgccgaagcggaaagcgaaaagcatgagtcggaaacgaacgtgcgagccgtaccgccgggcatctacctcctaagcttatccgggtggtggagctcctctcgtctggctaccaccacattttgcggcggggaaatccccctttccccgccgctctcctctctcttaaactccttgcatgtgtagtacaatagggcaagcgcgtaaggaggcgtttcgtggaaaaaatctctatgtcacacgaggattatcttgaggccatcgtcatgctcggaggaaccaccgagcagtccgtgcgatcggtcgatatcgctgcgaagatgggcgtctcgaaggcgtctgtcaacaaagcggtttcttcgctcaaggaaaagcatctcgttgaccagccgtattacggcgatataaccttaaccgaggaaggctacgaatacggtacctctgttctcggccgccacgagttgctgctgaagttcctcactaagaacttagggatagatcccgaaatcgcggcagaggaagcctgtcagatggaacacgccatcagcgatgattccttcgagaaatgggctgcgttcatcaagaagctcgacgtgtaggcgagtcttgccgacggctacggcaggtggctgttctctttgttggcggtctgcatgtcgcgaagttcgcatgtcgcgtatccgccgaccgccaacgattctcgttcgcaaagcttcgggcctcttccccgtttcggttttgaagacgatcattcctgacacgccgggatagcctttcgaagctccgacaagctctatctcgcccttttcgccaagctcgcgcagattgcctgcgttcgccgaggtgtttcgggggcttttcccgtacggaaacgccctgttgacaagatgcgcatattaccgatcttgcatggcgtcggtatctgaaatatggtatcctgcgttcagcttctagcattgaacacaccgcaaacgaaacaagatgctgaggggagcggaataccgttggctggacaagcgaagatagtctcgtttgacgaggcaaaaaccgtgtcgggatccacccgtccgtctgttgctgcacccaaaagggcaacgggaaaacgtccgtcagcgaaaaccgcatcccagcctttggcttcgaagggatcgaaccgaggtacgggtggaagaagtgcgaaggtttccagcgcggcgggcgccaaggcgaagccgagatccgataggtcggggtcgaagcccgcgtccaagtcggcgaaatccgctgcgaagaccaaagcgcccgctcgatctaagacggcctcccgctcgtcccagaaggaggcgaaggccccttcgcgttctgggaagaaccgccaggaatctatgggcggttccaaaaagcgcttgtcgatgccgcgtgcttcggctgcgaatcgaggtgcagcgccccgttcggctgccctttcgtcttacgacgggcgcggcgacgatgagattgaagaggagtttgaaaccaagcaatctcgcattgagagaatgaagcgcaacgccgccaagaataaggccggaaaggcgtttaccaggcagttcggcagcggagattcgacagaatcgacttcgggcggaacgcgtgcggcactctacaagggcgagatgggccgcaagcacaagcaggcgacgcgcatgcagggcaaccccgggcagtccatgggcgcctcgaagaagcgcttttcgggcataagcctcaaccctcgttctccgaagttcgttgcatgtctcatggttgccgcatgcctggtgctttcctgcgtgttcctctatccgacggccaagcagtattacacgacggttcgcgagcacgatcagctcgaggccgaatacgaggctttgcagcagcgcaacgcaaccattcaggcggaggttgacaatttgacgaccgaagcgggcatcgaagaccgcgcgcgtaaggaattcggttgggtcaaagagggcgaaaacgccgccaacgtgtacgggctcgatacctacgaggatgactcggcgtataataaagccattactcccggaagcgtcgaggctcccgaaacctggtattctccggtgctggatctggtgttcggcgtcgaatagcgttcgttgtacaatcgataaggattagcccatgcgcacaaaacggtatgccgccatcgacatcggcacggttacgtgccgccttcttttggcggatgcaggcgagcaggggttggtcgagttgcaccgtgaggtcgcaatcaccaatcttggcgagggagttgatgcgacgggcgtgctcaagcccgaagccatggagcgcgttgccatccagatgaggcgatttctcggaatcatcgatgagtacaggactcccgagcatccttcgatcgacatcatcgctctggcgacttccgcgtcgagggatgcggcgaacgccggggagttcgtttcgatgctcgacgggatcgggatcggtttgacggtgataccgggagagcgggaggcggcgctttcgtttctcggagcgtcgagcgattttatcggcgaagatctcctcgtcgtcgatatcggcggaggatcgaccgagatcatcgcaggcacaggaggaaaagagcctgttttcaagcactcgttcgatataggctgccgtcgtgttaccgagaagttccttgcgagcgatcctccggctgccggcgagcttgccgtggcaaaagaatggacgcggcaagccatggagccgaagttcgccgaactgaggcaaaccggcttcgcaccgaagcgcatggtggctgtggcgggtacggcgacgagcgtggtttcgatccatgagcatatgaaggtgtacgacagcgcgcgcgtgcacaagaccgcggtggatgccgccacgcttgaagatgtgtacgcgcagcttcgttcggtcaaccttgccgagcgcaagcggatcgtggggctcgatccggggcgtgcgagcgttatcgttgcgggcatgctcatcatggaaaccgtgatggagcttgcgggcgtgggcgagttcacggtgagcgaaaccgacatcctgcagggcatcattctcgatgccgccagaaacgggaaatagccgcagcgcagatcgccgtcttttgctatcatgatgcacgttcgatgcggcgcggcttgcagcgacagggggggcgtggcggaattggcatacgcagcggacttaaaatccgccgacttcggtcttaagggttcgagtcccttcgcccctaccaataagttgattcatgcaagccagtctgcttgcagctcaaacgcgttgccgtcaaagagatacggctggtagtggaagtagtttttctcggttgccggtttcgaattcccgagaatgagcaagtattcgctgtcgggtctttgctcgcaccgcagcattctcagtgtaagagatgcgaagtcggtatactcgccatgatcttttccgacgggcacgtatccgatcacagctcgaagcggacaattgatgtgggcaagtttgaccacttcgtccatccaatgttcgtcgtggttttcgtgttcgacggctgcttccaagtcccagagatacggtcgaaagccataaggggccttctccttgatttcttccgaacgtcctctccatgaaacgacgtcgattctgcagtactcgcggcttattccgatctcttcggcctctcgggccttcagggaatcctcgatcaccgaagagatcgtctttgtgaaagcttcgctgtttcggtagtcgcgtacgcattcgtcgcgtcgcgtttcaagcgcttccagaaacgatttgaagaactcttgtgcgttcatggcgtttgtctccccgtgtttttaggcggctaaacgagtttaccgcattgccgccattcgatgggacggcatcgagtcacggggtggaggcagctcgtgacggatggcgcaagctatgggcgattcctgacggatcgttaacgaaaaacggaaaaaacgacacgaacggtcgctgtttctttcgcggcgcagtacttgtggtaccatttcgtgaagtatgcgaacgaagacggataagaaagcttccatgaacaacatcaacgagattgtggcatcggtgcagaagcaacccgaaactttcgaagaatacctcatttcctacgcggagcaagtcggcgaattggtcaactcgtacattcccgagggcacgcatcccgatatggagcgttatctgtacaagccgctgcttgcctacagcaaaaacggcggcaagcgccatcgccccctcatctgctttgcggcttgccaggcggtgggaggcgatatgccccgtgcaacatctgccgcagccgccatcgagcatttccataccgcggcgctcatccatgacgacatagccgatgaggcggagcttcgccgcggcgagccctgcatgcaccttaccgagggcatcggccttgccatcaacgcaggtgaccttgcattgtcgctcgtcaacggcacggtcatgaacgatccgctgcttgatgatgcgacgaaggtgcgcgtggtgaccgagctcgtcaatatgacgcagcacacgatcgagggccaagcgctcgatatcggatgggcgcgcgacgggcgctacgacatcacacccgaggattacctcgtcatggcaacgcataagaccgcccactattcgggcgcggttccgttggcggtcggcgccatcatcggcggcggcaccgaagccgaaatcgaagcgctgcgaaactacgggctcgatacaggtctcgcattccagatccaagacgacctgctgaacctcatcggctccgaagagagcatgaagaaggatttccgcaacgacatcaccgagggcaagcgcacgctcatcgtcgtgcacgccctgcagaattcgcccgatcgcgatcggctcatcgagattctttcctccaaggagaaggatccggctgtgttggcggaagcggttgccatcatggaggaatcgggcagcgtggagtacgcgcgcaactatgcggaaaacctgacgagcatcgcgaagaatcgccttaccgatatggtcaagccctcgccttcacgcgacctgctcgtttcgatggccgattggttcgtcaaccgtttgaagtagcggttttgcggcggcccgaaccgcatgtgtgatttgcgtcggtctcgcaatagttttctaaccgatttgtgaacgcgagcagcttggcatttgcgctgcgctacaataccgccatggatacgattcgcagacaagataccggggcggcagtcgaagacgtgcaacaccgtctttccctgttgggcatcctcgacgaaagccaggtaacgggcatctttgacgaggcgaccgccatggccgttctcacgttttgcaaacgcaacgatctgggcgctttagacgaagtgaacgaaaaggtatgggcggccctcgtcgatgccacgttctgtctgggcgaccgcacgctgtatcttcggatgccttatttccacggcaacgatgtgctgcaattgcagcaggcgctcggtgcgctcggcttcgcatgcggagcgttcgacggcatcttcggggcctacaccgaactcgcgttgcgtaaattccagctcaatctcggccttccttccgatggaatagccggcgccatgacatatgccgcgatccacaacctgcaacattcctgggtgggcaaagaggcatccccggcggcggggtacctcggcttcgctcgcgctgccgatgtgctcgaacgcaatgcgctctgcctgttcggtacgcaggagttcactcgcagtgtcgcatcgcgcatgtcgaacctcgccttggctaccaacccggcatcgaagatactttcggccgatacgctgctggtggctcccgatgagtcgatgctgctcgtgcacatcgtgttgcccgaggaacagactgcggaaagcgttccccgcgttgcctacgaagacgacgcgacgcttgccctgcgtctcgtttcggcgatcgacgccgcctccatgcaccctgcacgcgtagcggtggagcttcccggcaccgtttgggaagaggcgggggcaggtcgttcggcccagcatttcgcgatcacgttgctcgatgccctgtgtacggcgctctcgcagcactgacgccgctagcgtttgcggggaaaccgtaaggcaatcatcggttcgttgacgcttttcgccgcgcttcgccgccgtttcctatactgcatagcatgtacgatggcccgctttgcgggcgatgcgttctgcttgcccggctttccatgctcatcgaggccgggcaaacagaacgaccgatcgagaaagggtttcctatgaccgaagaaaacaatgccccgcagcctcagccggcaccccaacccgtgcccgaaccgcagccggcctcccagccccaacctgcgccgcagccgcagccgatgccccaagccgaaccccaaccccagccgcagcctcagcagccctatggctaccagcagccttacggctaccagcagcccgtgtacgcgccgacgcccctcatgcagcttaccggcggcatgaagttcggctggctcgtcgttggcgcgttgatgggtattccgggtatcgtgctcgcatggcttgtcaacgccgataaagctccccaggtgaaaagcgatgcgctcaagttcgccatcatcgggttcgtcatctggatcgtgctcggcatcctgttgagccttgcgatcacgggcatggtgaccgctgtcgttgccggcgccatgggcacggtgggcggcggatatcactacggcagctcttggtaggcgggcttgcgacagcgcctcggtcggcctgcgtgcgccgatcgcccatgggatgcgccgccccgcgaagggcgactgatccgctgctcgataccgtgcctgatcacgcctcgtaatacggattttgtaaataacttgttgcaaggaaggccccgatcggggccttccttgcgtgcgatggtacaatgatccagtttcccattaacaaaggagtagcacacaatggcacgtcccatgactatggcagagaagatcttggccgcccacgcagggcttgaagaggtcgagcccggtcagctcatcgaatgcgatctcgatctggtgctttccaacgatgtaaccgcaccgatcgccgtcaaggagttcgagaagatcggcaccggcaaagtgttcgatccgaccaagatcgcgctcgtacctgaccactacgttcccaataaagacatcaagagcgccgaacaggccaagattgtccgcgatttcgccaaagcgcagggcattacacactactacgaagtcgggtgtatgggcgtggagcatgcgctgctgcccgagcagggcgttgtgggtgcgggtgatttgatcatcggcgccgacagccacacctgcacctatggtgcgctcggcgcgttcgcgacaggcgtcggttcgaccgatgcgggtgtgggctatgcgacgggcaaggcgtggttcaaggtgcccgagtcgattttgttccgcatcgaaggcgagcttgcccccggcgttgtgggcaaagacgttattctgcacatcatcggcatgatcggcgtcgacggcgctctgtatcaggcgatggagtttaccggcagcgccatcaggggcatgtcgatggaagaacgcatgtccatctcgaacatggcgatcgaggcgggcggcaaagccggcctcatcgaagtcgatgacaccacgcgcgcctacatggacggtcgcgtcgagcgaccctacaccgaataccattccgatcccgatgcggtgtacgcgaaggtctacgagatcgatgccgccgatatcgtgccgacggtttcctttccgcacctgccctccaacacgaagcccgctgccgaagcgcgcgatatcgcgatcgatcaagcggttatcggctcgtgcacgaacggtcgcatcgaggacatgcgccaggctgccggggtgttcaagggccgcacggtgcatcccgatgtgcgctgcatcgtgattcctgcgacccagcaggtctaccgtcagtgcatcgaagagggtctgaccgacatcttcctcgatgcgaactgcgctgtctccacaccgacctgcgggccgtgccttggcggttatatgggcattctggcagcgggagagcgcgccatcgctaccacgaaccgcaacttcgtcggccgcatgggcgatccgacgagcgaagtgtacctttcttcgcccgccgttgccgctgcgagcgccgtactcggccatatcggtcttccggaagatctggattaaggagctgcctcatgcaattcaaaggaaccgcgcaccgctacgggcgcgatgtcgataccgacgtcatcattcccgcgcgctatctgaacacatctgatccggccgagcttgcaaaacactgcctggaggatcttgataaggaattcgtgggcaaggtgcaaccgggtgatatcatcgtggccgacgagaacttcggctgcggctcgtcgcgcgaacacgctccgatcgccattaaggcggcgggcatcgatgtggttatcgcgaagagcttcgcgcgcatcttctaccgcaactccatcaatacgggacttgccatcatggagtgccccgaagcggttgacgccatcagccagggcgacgtggtgagcgtcgatgccgatgcgggagtgattgtggacgaaacgacgggccagactttcacggcgcagcccttccccccgttcatcaaggagatcatcgaagcgggcggcctcatcaaccgcacgaagcagaagctcggcaagtaattcggcaagcaaccaaccgttcgagcggggcgcgctgcagcggcccgctcgaacgcgcagcaaggagaaacaatgacggcaacctacaagatatgcctgcttcccggcgacggcatcggaccggagatcatcgccgagggcgtcaaggtgctcgatgcggtgggcgcgaagttcgacacggcgttcgaatacactgaagcgcttctcggcggcatcgccatcgacgagacgggcgaggcgctgcccgaagagacgctgcgcgcggccaacgcatccgatgccgtgctgctcgcagcggtcggcggtcccaagtgggatacgaccgatccggaaaagccgcgtcccgaacaggggcttctcggcatccgtaaagaacttggcctgtatgcgaacctgcggcccgtgcgcatcttcaaggctctcgccgatgcctcgactctgaaatccgagatcatcgacggcgtcgatctgctcatcgtgcgagagctcaccggaggcttgtacttcggtgcgcgcgagcggttctacgacgaagagggctgcggcgtggacggcgcagcggggcagcgcgcctacgacacgctcgagtaccgcgagtacgagatcgagcgcatcgtgcgccacgcgttcgaaaccgcccgcaagcgtcgaagccgcgttcattccatcgataaggcgaacgtgctcgagacgagccgcctgtggcgcgaggtcgcgcaccgcgtcgctgcggaatatcccgatgtcgagatcgccgacatgctcgtcgacaacgcggccatgcagctcatcaacaatccggcgcagttcgacgtcgtggtcaccgagaacatgttcggcgatatcctctccgacgaggcatccatgctcactggatcgcttggcatgcttgcgagcgcgagtctgggcgacggggtggcgctatacgaaccgagtcacgggagcgcccccgacattgcgggcaaaggcatcgcaaacccgcttgcgcagatcctctcggtcgagatgatgcttcgctacagcttcaacatgcaggatgcggccgacgcggttgccgctgcggtcgaagccgtgctcgatgaaggctggcggacaggcgatatcgcgggcgccgaaacgcccgccgacaagatagtcggcactgtcgcaatgggcgatctggtggtttcgaagttgtaagccgctgttttgcaagaaacgccaagggcggaagccgcatgcacgcgggttccgcccttgctgtaggatattgccctcgaacgggccgtgctatattcccgcagccgcgttttcgccggcaaccttgccgtaatacagcgccatggcatggcttgcccccgagagcttgaaggggtacttcacggcaaagcggtcgccttgcgagtttcccgacacgtatagaccggggatgggtttgcgctcggtgctgatgacgtgcgcgtactcgtcggaagaaagtcctcccatggtggtcagacacaagccgacgcccatgcgctgcgcgtagaacggcccgtcctgtacggggaacaagtatttggcttgcttgccgaagtcttcgtcgacgccggatgcgcacagctcgttatagcgctcaacgcttgcaagggcggtttctacctccatgccctcgatcgctccgaacagctcttcgagcgtatcgcctttgaatacggtcttcccatcgactttggcatcgatctcggcgagcgtggtggggaagtcgagaatgcaatcgccaacctgctcgtcgaggtgcccgtcgaagatgagaaacgcttttcgctgcggttggcggtcgaagacgagttcgcaatcggagcagttggtatcttcgttcatgaatcgctcgccgttgtagttgagacggaggtgcggcgatgtgaggcccgatgatgcgtccatgtcggcaacgtcgttgggaccgcccatgacatggcacatcggcgccatcatctggctgaacgcagcgcctgcccagtaccccatcttgtaagcgtcgccggtattggtcggatttccttcgacatccatgttcggccaggcagacaggttgccgttttcggccatcgcggggtagaaggccttgaccatgtcctcgttcgatccgcagccgccggcggagaggacaaccccttttgcgcagttgacttttttgtacatcccgctttcggagttgcgaacgtacacgccgacgcaggtgtcgccgtccatgatcagctgttcggcaaaatgtccgaaatacgcggcgcctccttgatcgattcccttttgcaggttggcgttcacgacgtgttcgtgatcggtcagggctacgcgtgtgggatagcctgcctgcggttcatgttcgtagtcgaccgaaaggtctaccatggccgaaatcgatacggggtgctcgtcggatcccatcatggatatcgtttcgcccgcggcggggatgtacatatcggggtctccgttcacccaccaatcaaacgaatcggattggttgcggatgaagttgcgtatgatggcgtaattcgtcatctgggagcactggttccattcgtcttcgatgagggcgtcctcatccatggtcgccagtccgagctgctcggtaagggtgccgtttacgtagcagtattgggacgaccgaacaccgggcaccgatcccttctcgaagccgacgaccttcgcaccggcctctgcggcggcgcgaaaggccgccacccccgatacgccgagtccgacgatggcgacgtctgcgtccagttcttcctctatgtcgtcggcattgatttcgggcggggtcgcgggccatggatacgtggcgccccaggaactggttgccaacccatcggccccctctgccgtattcgcagcagcgccggttgaggatgacgagccgccggaagaggatggcgagcatccgccgagcatggcggttccaacccctgcggcggttatcgctgcgccggttatgaacgagcgccgtgaaatacccgatgctccctttgcgtaatcagagagttttttcatgatgtatcccttctccttcgtttttaatgcgagtgccgcaaggtggcggccattcgagtctagggatcgaggaaaagaggagccatcaccccaaagggtgagaccgatcaccttatcagatcatttttcgcgtcaggagccgaggtctctgcaagcggccatgcccgtgtctgccctgtgctacaatgcgtgcagcagcaagctgggttgtgagggggctttttgatggatggcgatttttccgacaaaggcgcacaggcttgcggcgaaggttcgcttcgtttttccgatagcacgcccggacggttccgcttgcggttgcttgctttggcgccgttgcttgccacggtgcttctgtgcccctccatgagcagtgttctgcagggcttttccagcattgaaggcaccgcttcggcctatatgacttcgctgtacgcaatgggtttggcgggctcgcttgctttggctttggcttctgcggcgaatccttcgtggagcggattcggcgtgaagggagttgccgttttcgctgcggtttacgtaattgccgccgtgtcgttttcccttgcgatctcgttttcgtgccagagcgtgcttttgtttctcgtgctgggcggattggccggtgcgagcctcgttcccctcggtgtagagtgggtggcgtgcttttccatggggcttcgctccattatgctcaacggggccctcgcttttgcgattgcctcgatgctcgtttggctcatatcgctttgtccgatagagatcgccctgatcgtcttctccgcatgtgcgtttgtcggcgggttcggtacgctgattctggcgtttcggttgcggcgctgtttgggagaaggggagcgccaatcgggcctgcctcaggctgcggcgccgtttgcgagtccgcaaggcatcgcgcgttccttcgaaacggttctttctctcatgtggatgcctttgctcggatcgttcatctgggtgttttcaagtacgatggtgaaacacgatgatgcgacggtggacttcgtctgcgctctgtgcgcagcggctctggctttgcttctctgctttataaagccgcgcacctccttggcggtgctcgtggggcgcgtggtcgtccctttgtgcgttgtggcatgcgtggttctcaacagccttccgcccacgagcggctcttcggcgcttgtcggcccgatggtcggcgttccgctcatcttcgtgtcgatattcgtagcctgctcgcttgtcgtggtggcatcgtcgggagaattccctcggccgttcgtgttcggttccgtgatggcgttgcagagtcttgccatcctgctggcgatgggtttgcaatcggttttcgagtattacggcatcgacaacacggatatcctcaaggtcttggtgaacgcgtacttcgccgcagttctcgcgagcctcgtatacacttcgtggaaacagcttgtttcgacgaaagcagaaagcgggtggggggcttcggcggttcccgaggtagttgaagaggcgtttcgcgcgcgcctcgacgccctctcaagcgaagctgggcttaccgaccgcgaacgagagctccttttctaccttgcccgcgggcacagttcaacctatattgccaaaaccttgttcatatcgtcgaacaccgtgaaaacccacacccgccatatctacaggaagctcggagtcgggtctcgagacgagcttcttgcccgactgagcgaacctgtttcctgaaaagagcatgcgcgagtgcagcattctggcggctccgtgtcgcatcggctgcgtcgccggtaccagcgagctttaccgcgtcttttcctccctgccgttcggttagggtgccggtcttttcggctcgctcgcttgattatatgttgacaacatatatgcagaggtatatgttaacgtcatatagatgataccgacaaagcaatgctgcgggttgtcgggcgtgcgagcggccgggcgaatgcgcggtattgctcagcgagcgcgtgcgatgcgacggctgcaaggcgacgggaggagaggcgaatgtcgaggggcgattgttcgggcaacgaagcccgcaaaccgtgctgccgccgccgaggcgggggaggcggggcgcttgtcgagcccgctgccctggctgcgcttctgtatgcgggcgggtacggctacgatcttcgccgaaccattctcgagatgagcgatggcgaggtggacgccgatgtgggaggtttgtaccgcacgctgcggcgcatggaggaagaggggtcggtcgtgtcgcgctggtgcgaagatggatcgggcccccgtcgccgcgagtacgagctgaccgtgcagggcgtcgagctcgccgaacagtggatcgacgcactgcgcagccgcgagcgcttggacggattgcttgcatcgatgttggaagacgggctaacccatctcgaggagaagagatcagatggtccgaaagatgatacgggagcggatcccggaaaggaaggataggatcatgagcgaaacgatgaagctggcggtgccttcgatgggcgagggcggtctggaggccgagcggtcgggccacttcggccattgcgattgcttcacgatcgtcgacatcgtcgacggcgagataaaggagacgtcgattctcgccaatccccctcacgaggagggcgggtgcctgcgccccgtggggctcttggccgagcagggcgtcgatgccatcgtagcggccggcatgggcggtaggccgctcatgggcttcaacgatgcgggaatcaccgtgtacttcgaaaacatgacgccgaacgttggcgatgcggccaagttggtcgcccagggcaatgtgcccgtcatgggcgtcgagaacacctgtcagcatcaccactaggcgattgggcgtcatggaagacgaacgaaacgaagccgattcggtcgaggacgccctcgatgtcgatgcggaatcgtcggcgacggggatcatgcgcatggttgacgcgtccctttccgcgcaaacgcctccttcgctgaggagctgcccgcctccgggtacgagccgatcgcagggttagggcgtcagacggcaaacgggcaagagcgggcgggtgcgaagatcgcgcccgctcttgcgtgtaaggacgctgtgtgatcggctgtcccagggtcgttgcgccaacctccggcgtgcaactctggtatccttgacggtatcagaaaggcggcaacgatgggcgatgacgacaagagaacaggcggtatcttcgaggcgaacaaggcgagcttgatttttgcgactaagcgggagcttccgggcgcaatgcctccgtgtgcggggttcgcgccgcagaacccctacgggtgggtaagcaatgccatgcccgcccccggcaaagacgaaaaatacatcgtcgagttcctcgggaaaaccacctttcgcgtgatcgcttatttcgacaagttcgcgcgtgcgtttgccgtgaatcaacccatcacgtacccgcctgcaaccacgcccgaccttaccgtatcccgctattccgaccagccgagcgggccggtcgagcgggggtgcgtccaggtgctcgattccagtggagagatgcatgtcgtctcggagtacaggttcgagcggggacgctattacatcgagagctcgtggttcgatttcgctcagttcgggcaaggtctgctgtacgaagagttcgtaacgcgcctttaccttgcgttcgtgtaccgtcctgcgctctgcggcacccaaccgccgctttacggaatcgggaacgtatcggaggagctgcagaggggcaagcccctcgatgcgctcgagcgcatagcgggcgttgtggcgggcgccgatgccgatcctgcgctgacggcacccggcatcgagcgcgcgcttgcccggtggctcggcgaagcggggctgggaagcgatcgcgcaaccgagctcaagcgcaccgcgaagagcgatcctctgcggcttgttcgaacgaaaaaatatgccgacacctactacctgggaacaaacgacgacgaggcggcggcgccgttccgtcgcacgatttgggcgctcgagggcgcccttaaccgattcctcttggtatccgaatcgttgggtgatcgggctgccgcggcttcggaatccgaggtcggacaatgggattactatctgatcgaatccgttgctcggcagatgccgcttgcagagagcccggtcgatgcgcagggcgcggcggcgggcgagtggtccatacggctcgggatcgcccaagcagtcgagcgtttgcgcctcccgtttcggttcacgacggatttcagggtgaatgcggaaggcggcatcgtggcgttcgatgccgttgcgcccgacgcttcggtcatgccgaaaagccgatggcgcgacgaagcggcgggttggagcgaggtttcccaggcggagcgcgaagtccaggcgatgcgatacgccatgcggcttgcgctcatgcttgcggccattgcgttttaccagagcgtctcgatcgaacgcgttgcggttgccgttcgtcccgtttcggatgggaccgacgagcccggcgggtcgggcgagtttccccaagagggcccaccgaggctgttttcggtcgagttcgaacgggcggccttttgcggcaattcggcgtatcgccaagccggcgaaggggatccgtttccgttcttcaactgggcgggtgcattgatcgggcaagccgatatcgcgtctccgctcgaagatgagcgcctggcgaaccccttgcgcaccatgccgcctgaaatatccgagcagccattgcctgaatttgcccgcgcgccgctcggtgcaagcgagctgtcggatcttgcggtcaactacagcgccaaacgccggcatacaggcgagcagctcgccgacgcgattgcgaaggcggagagcaccaccgagagaatacgcatcgtgagcgcggtgaaagacgcatcggccgaccttgacgtgcaggaggcgtgcacgaggctcatggttgcgttgacggccgatgagatcgacccgggcgaccagaatgccatcgtgaaccggttcctcggagaggatgagctgatcgctgcgatcacgcaggcgcggatcatggccgagcgaggcgagatcgacgaagcggttacaatgcttgcccttgccatcggcaaagccgagcaatcggggaggttcgccgataccgccgatacggttttcaggtgcttcgactcctatgcatcgcgtgtggtctacaaccgcgcacgccaggcgggtagattcgaacgcgatgcgaaccggcgggtcgagctcgcgcccgattccctgtacttctgctgcctcgaagtggtgaagatgctcgagcattcgttcgacaggaccgaagaggctctcggctacggcaagcgctgcatggagcttgcgccgacgggtgggccgggatacctgcagacggcgcgcacctacatgctcgtgggcgatatggacaacacgattgcaaccatcaaccgatacctcgagctggcgatccttcccaacgaaatagccatggggtactatcagcttgcctatgccgaatggaaagccggacggcttgcggcgggtgtggcgggatacttgaaatcgatgacaacatcgccgatcatctacgatcaggcgcgcctggagctcgaggagcttctcaacgaaccggaggccaacctgcttccccccgacgagatcgacgaggtgctcgccgcgcacggcgtggtgctggctccttcggaagaggctttcgaccggctgctcgaagcctcggcggcggcagtggatgccgggcttttcgttgttgctcgcagcgtgctggctgcgtactgccagcatcggcccgatgacgcaatcgtgaacgtacttcgctcgctgggcgattagagaaaggaaccgaatggcactgcaagctcccgaggggacgaaagacctcttgcccgacgaggcaaagttctggaatacgttcaagcagaccgcggcagacgtgttcggccgctatggctatcttcccattgagacgccgatgttcgagcagaccgagcttttcgttcgcggcatcggggaagccaccgacgtcgtatccaaggaaatgttccaggcgatttcgggcgagaacatgaaaaagctccttgcgggcgagagcatcaagagcaaaagccgcctctcgcttcgccccgagggaacggcgggcgtggtgcgcgcggtcgtgcagcacgatcttgtgccgcagggcgcggctccggtgaagctcatgtacgcgggcccgatgtttcgcgcggaacgcccgcagaaggggcgctatcgccagttcaatcaggtcggcgtcgagtgcctgggggctgaagcccccacgaccgatgccgaggtcatcatcatgctcatgaggttcttcacggcgatcggcatacctgcgcaatcgatgcgcttgctggtgaattcgatggggtgcgaaaaatgcaggcccgcttaccgcgagctcgtgcgcgcttacatggaagaccgccgggccgatctgtgcgacgagtgcatgcatcgcgccgagatcaacccgttgcgggcgttcgattgcaagaatccgacatgctcggcggtgatggatgacgcgccgaagatcaccgactacctgtgcgatgactgcaaggagcactattccgccgtcaaatcctatctcgatgcagcttcgatcgattacgtcgaggatgctcggctcgtgcgcggactcgattactatacgcgcacggtgttcgaagtgcaggttgtcgacggcctcggatcgcaaaacgccatcggcggcggcgggcgttacgacaagcttgccgaggaagtcggggggcgcccgacttcgggtctcgggttcgcgctcggctacgaacgatgcgtgctggccttgcaggcggccggtgtcgaattcgctcctgcagcacggtgcgactttttcctggcatgcgttgacgagacgacgcgccagacggcgttcgggctgcttcaaatggctcgcgacgccggcctcatcggggagatggatcaccagagccgcagcctcaagagccagttcaagcttgccgacaagctcggtgcccgcatggttgtcatcctcggtcccgacgagcttgccgagggcaagataaaagtccgcaacatggcgacgcgccgcgaggcgctcgtggacctcgaaacagccaagggcgtgctcgcccgtttcggcggccagccctacggcgaccagtccgccctaaggctcgaagaggtttttcctgtcgaagagtagaggcgcatattttttcaggaagccgttttctgatagcgaataacctgatcaagggactcatgcttaaagcatgagtccctttctggttctatggggatcagagacgcaagtgaaatccgtactggctgcagctagcctttcgcctatcccgatcttttaatgcgggtaggtgcttttcggatgccgatcggcgcaaggcaagacggtcaagacgggcgaagctcccggcggacgccgccgacattgcgaaaagtgagcagacaccttatggaaaggggaaatgctatgagcaattggaagtggcaagagggcgactatactgtcgtgcgaacttgcgcgtggtcgcctccgggcgagcatccggtgggatgggggctccgtctgttttacaaagacgacgtgcttcatcatgtcgaaggcgatccgaccaatccgatcacccaaggccgcgtctccatcaagttcctcgagctcccggcgtacaacaacagctcggagcgcattatctatcccatgaagcgcgatccgaagaatcgcggagacaacagcaaatgggagcgtatcacgtgggatgaagcctacgatatgatcgagaaggaaacgcgccgcatccaaaaggagtacggacccgaatcgatcatgacgttcatcggcacgggccgcgatctttggcataccgttcccaagatcacgttctcggctttcgaatcgccgaacttcaactacccgcacaatggttggtcgtgctacggcccgcgttcttcgatttgcgtatacgtgctcggtgccggatatcccgagctcgactacgcgaccgagtttcccgagcttcgctacgacgatccgaactacgtgctgccgaaatgcgcgctcatcatcggcaaggacccgctcgtttccaatcctgacggtctgttcggccacgcgctcgtcgatatgatgaagcgcggaaccgaactcatcgtggtcgatccgcgcgctacatggctcgcgacgcgcgcaaagtacttcctccagctgcgccctggcaccgacgccgccctctaccttgcgatgtgccacgtcatcatctccgaagatctctacgatcacgagttctgcgacaattgggtgtacggtttcaaggagttcgccgagcgctgcgccgagtatccgccgtcgctcgcatcttcgataacgggtgttcccgaaggcctcatcgtcgatgccgctcgttactgggccaccgaaaagcctggttccatgacctggggacttgccgtcgacgagaaggtcaacggcatccagaccgcgcaccttgtgctgctcatgtgcgcgatcaccggcaatctcgacgtgccaggcggcgttttgctcggcggttccgaccgcgaggctcccacctcttggtggggctgggaagagcttgacgacgatatcaaggccaagcgcctcggcgccgccgagtacccctgcgtatccacggcatgctcgacgacgcagtgcgacatcgccatggatgcgatacgcaccgataagccgtatcccatcaagatgacgttcaccatgagctcgaatcccatcgcctgcccctcggcagatccccgaatggtcgatgaggccatgcatcgccccgatttcaacgtgttcgcggatcttaccatgacgccctcgtgcgcatcttacggcgatctgttcctgcctgtggcctcaaccggtgaaaaggacggccttgttgctacgcattatggcgcgctgacgctgttcgtggcggcatgcgtcaagggaaaccaggtcggcgagtgcaaatcggacgacgagatcatgctcgacctcgggtggaggctgaatccctcgaaattcccctggaaggatctctacgagttcctcacctgggaacttaacggctacggcgtcgaaggaacgtgggaagatcttcgcgattccgaactgggattcgtgacgcctccgtacgagttcgagaagtacgcctacggtcttcagacgtggaatggcgagcccggcttcggcacgcaatccggcatggtggaggcgtattgccagcgcttcgccgactggggcgacgatccgatgccctattacgaagagcctccgtacagcccggtcagcacgcccgatctggctgaaaagtacccgttcgtgctgacgaccggtgtacgttcttggtcttacttccattccgaacagcgtcatatcaagcgcttgcgcaaccttgatccatggccgacggtcgaaatgaatcccgccgacctcgagcgcttgggtctcgccgatggcgattgggtttacctcgagaacatgttcggcaagtgccgccagagggtgcgcgcaacgccgatcgtcaaagagggaacgctcatggcgaagcatgcctggtggtatcccgagaagggtcccgacgacaaggggttcggcccctacggcgtgttcgatgcgaacatcaaccagctcgttccgcacggactgtacggcaagatgggcttcggatcgccattcaagtgcatgatctgcggcgtgaccaaggccgagggaggccctgatttcgaagagggctggccggtcaacgcatgggataaaaagccagcatacctcgagcgctagagaccgaaaggaaaggggtgaggatcatggcagacaacaaggcgatgggcatgcttatcgactacgactactgcacaggttgccattcttgcgaagtgagctgcaaagaacggttcgatctggctgaagacgaatggggcataaagctcgccgataacggcccttggcgctacagcgaaaccgattgggaatggaatcacgttcccatcccggccgagcattgcgatttctgcaaagaccggatcgctgcgggcaagaaggctctgtgcgagctgcattgtcaggcgctcgtcatcacggttggaccgcttgacgagctgatgcagaagatgacgaaaaagaagatggtcctgttcaacgagacgaacgacaagccgcgcaagcaggcagtctactaggaacgtgaaacctgccgcggctgtttcgccgccgcggcaggcacgcaggcgggcgggcgtcaagcggacggccgcccttggccgactacagagagaggagccggtatgagcggcaagttcatcctggtaaaggaacgtacgaagtaccgcttcaacctcgtcgacgatgcgggcgacatcctgttcaagggagccattgcgtcaacgagggatatggcgcagcgcaaggtcgatctcatgagaagctggggcgacgatctgaagtaccacctgcagcccatggcggggccgcacggcggctacacgatccgcggagaagagcatacgtcgcgcgaaggggagcagggtcgtatcggcgatgccgcgcccctcgggttcagcgcggtgttcgagaccgaggccgagatggataaggttcgcgatgccatcatcgcggcagcgaagggcgctctggtcgaagaccagaccggcgaataacagggtgggcgtgcaggtttctgtgcgcccaccaccgccgccgtaggatcagatcggcggatgcgacaggaaagcaaaggagatgggtgccatgtgttacagaccaccacaggcggaaatcgctgccgccgaagcagcgggtcctaagatgaaggattgccccgaatgcggagcatcccagccgttgacggcgaaggcgtgctccgagtgcggatacaaattcccgcccatgaagctcaacaagacggctggaccgggcgggcctgcgagtccagcgccgaaagcacccgatgctccggccgcgccgagcgccccgaatcccccgagcgctccgaagccccctctctcatagtcggggaaaacggcgacggggaacaacagacatcgaacggaggcaaccatggagagcggaacgtttgaactcacgcaggtgggagctaataaaagattcgttatccacgtgaaagacgaggaaggcgccctgctgctcaaaagccagtatagagagttgaaaccgatgtgcctcaacgagataagctggattcggatcgcgggtgcgaaggacaacctgtacgagtttctcgaaactgaggatggaagcctgtatttcagcctgcatgccgccgatgcgcatgttttggggacgagtcccttctatgaaacagttgtcgatagggataaggccgtagcttccctgaagcgcatagcggccaccgccgaagtgcgggattctactcccgacgatgatctgacgacgcgggtgcatgatgttctgcagtcgtatgcgcgcgaagtaatggcgcgagcgtgacattggcgacagagagtgtgcaaggatggcgccatgaagaactaagttgtatattgggcttctgacctgcagcgtggttatgcggcataggatgagtgccgcacgggagcaagccgttttctatgggggattggacgggtgcgcgatgaatgatttcgtgaggcgctggccttcttcggatgtattgctcggtgcgataggatacggtatggccatcgcgctgttctacatcgtgttcttcggcgatgcgctcgttgacattgcgtacggaagctcgctttccggggtgccggttcttgcgggattgtcggcgcttttgatttgcacgatgttatcgctgcgctacagcgataagctctcgcagatcggcacgcgtaagctgctttttccctccgccctcgtgctggcttcggctttcggggtttctgcattcatggagcaggcgggcatcgcaagcattgcgctgtcctgcatcgtgtgggcggttgccggcgttgctctggcccttttcctcaccgtgtggtcggaatacgttgcgaacagggaaaaagaaacgcttctggcatcgttcatcatcgcgtttgccgtggcgggtgccggcatggttgccgtatccttcctcgagccgaccgctcggctcgtcgccttgatcgccgccccgcttctgtcggccgtgttcttcgtgaccatgtcgcagggtatcgaatccggtcggttcgtgacgaggcgggaatcttccgagaacatgcatctggattggcgttcgtcgctttcctactcgatcaccggcgtcgttatcggaagcctcatccaatcgatcggccgctcgtttcccgcttcgggagccctgcttgagccggggtggggcgttttgggcgccgttgttgtatcgatacttgtcatcagggcgaaaagcgggtcgtggattttgcttggacccgttgagaggatcacgtttccgctgctcgtggccttgctgcttacgctgcctttcgtttccggaccggcggcggtcgggtgtgtcgtcgttttgatgacggtgttgttcatgcgcgatctcgcccgcattgtcaacaggtccatacttgcaatcgaattcgaagcccagagctgccatttgtattcgcgtaccgcgttgcccttttatctgggtttgagcgtgggggtcgtgctcgatctgatattcgctctggcggttccttcgttttacgcgattgcgagctcgctcgttttgacggtgcttctgtcggtcggcatcgctgtggttccgtatggcgccgatccccttaccatgccgtttgcttcgtcgcccgcagccgacgaggggctatccgacgaccacatcgggcaggggctgtggcgaaaagcgtgcgagcacgtggccgaaagcgtggggcttactccgcgcgaatgcgaaatattccatctattatcgcgaggccgatcggcgacggttattgcgcgtgaactgggaatatcggtgtataccgtgaaatctcatacatataacgtgtatcgcaagctcgatatcgaggcgcagcaggatctcatcgatcgcgtacaggacgagcgcatgcagatcaagcgtgaaatagaggagcctcacgtgaggctctgacctcgggcttgcctttagctgcaaaagcgaggtgattccatgtgtttgacatgcaacccgtactgtgggcgatgtcatcctccgcgaaagcgccgtcccgtgcaatgccccgattgcggtgcgaccaatgctttcgaggatgggaatctggcgaggacggaatgctccttttgcggaggacgccttcctgaagtgcgaacccagccgaccgttcgctgccgctacaccggcttgctttgttccgagccgtgcggccgcgcgaaggagagcccgcccaagggagcggcgccggcgcactgcgaagaacgcgtcgcgccccttgatgcggccgcgttcgcaaagacgctgcggcatggtccctcggaaggctgaggcgacggtcggggccgagggtcccggggcggtcggttttggatagagcggagaatttcgaacggcgcgaaaccattcggttcggccgttagggcaacgtgtacatgagtgcaaggaggtgccaatggatacggggatagcaaaacgtctggcaggtgcgtttttcgtgggtggttgcctgggtcttttcagccaggtgctgtttgttctctggcggatgctgcttggcgacgattcggcatgggcgatgcctgcgacgctgctgagtttgggagtcgtgggcggtgccctctacgtgggtaatgtatatcagaaaatcgagaaggcaggtgcgataggagccgccatgcccttcagcggtctcgtgtctgccgttgcgggaatgtttctgcagggaagcgctgaaggcggctaccggaaaggcattgttcgcggacttggcgtgttcctatacgttttgggcgttggatcgcttatcgccgccataatcggcgcggtggcggcgctcgccgcttaaggaggccggtatggaatttgtaggagcgtttttggtgtgcggctgcatttgcctgtgcacccagttggtgagcgagcttcttccgaaagtgcccggccccacgctgtttctgctcgtgcagacggtcgctgcgctcttagtgccgacgggtgtcgttgccgcgttgacgaacctcgggcaggcgggcatcgtgattacggtattcgccgccggttcgaccatatgccaggatgtcggcatcatcatggggggggaggcagcgccgtgccactgataaccatagtcgcgatattttgcgccgttgccgcaatcggccttgcagcgggggcggcccatcgggcattgcacccggtaagcgccgacgggcaggcggccgagggcgatgaagataatctgtaaaggcgatgcggcgtaaaagagccgcgatggcgattggagatgggatgccatggggcacgcaaggttggcaacgtacgagccggttagcatatcgcttcccgatgcaatcgtgtccgatgcggatgtcgaggagcgcatgcgggagatagtcgggaaaataccgacttatgggcgggcgggaggctgcgggatctctgccgatgacaaggttcgggccgttgtaacgctgaaagaaaacggcgaattgctgaaagggttcgggggcagagaggtaaccatcaccatggacgatgggtttttcccggcaccgctcgtcgaggggatcattggcatggctgagggcgagcggcgatcgttctctttcgaaatgcccgccgtcggcagcggcgacggcggatcccgattgtcgttcatggaggccgatgtcagggttatcgaggtaaggaaacgcaagattccggtaccggacgacgaatgggtggccgtcaacatacctcgcgcaaagaccgtagccgaattccgcgcaagcgttcgcgagcagatggaggaagatcggagacggcgactggacgaggtgaagcgcgcccgatgcgtcgccgttctcgccgggcgcttggtcggcggggcgagccgcaaatcgatcggccgagcagttgcgggggttcgcgccgatttcgaacggaagcttgcggtcgaaggaaagacgaaggggggcaagcttgccgagttgggttggaccgaaagcgacctcgaggcttcgtttgcggccgaaggatcgcgcatcgccgccgaaggcgaggctcttgagctgatggccgagtattggggcatcgatgtaagcgatgaagaggttcggcgaacagccgagcgggtttgcggcggcatagccgctcggaatcgtttggatgaaagaggcgaatgggagcgcatgcgtacgcttgcccgttgcgaaaaaacgctcgaccaggttgtttcccaggccatcatcgctcttgacccgatgtctgcggcaaacccgtttggctgagattggctttcggggcatcggaagctcgattctcggtttcgccggcagacgtcaggcgacccgtcggcgatgaggtcgacgggtcgcctgtttcctatctgtcgctatgccaggtacgctccgaccgatttgccgcactcgcggccgagcgtgatggccatgccgaggctgcacccggggatgggcgtgatgtactcgtagccgaatcggcgaccgcagtcgttgcccgagacgtagaggcccgggatcggctcgaagttctcgtcgagtgcgttctggtcgccgtcggtgatgatgccgccgcaggtgaccatggtttctccgagaaccgggtcgaacgtgcaggcgtagaacgggggttctttgacggggaagaggaccgcagcgtcgcgtccgtattcctggtcggcgcctgcttcgcagtatgcattgtagttcgagatcgtttcgacgaaattcgcaaccgcatcgcctgtcagtccgagttgtccggccagtccttcaagtgtgtcgtcggcgatgaaatcgatcgtggtcaccggtcccatgccgccgccttcgccctctgcctgttcgggctcttcataggttcccttgaagatggcatatgctttatcgagcgattcctgcaacgaggcgatgttctcctcggtcgccgtgaagcccgcatgctgcggaatggtgtactggcggtattcggggaagttcgcatcgcatacggcgaacttggtcttgcggctcttgtacaccgtggccagaccgcgctgctcggaggtggcgtagtactcgttgcagaaacgcttgccgttctcgtcgatccaaactgcttggggcaggcagttcattttgccgggaagcgaaagccccttcatgttcatgccgggaatgggacaggtttcgagatgcgcgcctgcccaataggccatctgaacgccccggccatcgttggccgacatcgaggtcagctgctcgtcgccgacgagggcgtggtacatgtcgggcatgaggtcggccatcatctcggcattgccgccgaacccgccgcaggcgatgaccaccgctctcgcgttaagcttcaggttgccatcgggattttttgcgacaaggcctgcgacctgtccgttgttcatgatgacgtacagggcttctgtcgagaacaggaattcggcgcccttttcctgcgcgactgcgcggttgtactcgtggatcttggtctggttgcaatcgccgtagaagctgcaaacactcggccagaacttaatgggtccgatgttgtcgagctgatgctctgtcttcgggaagaacgccgtcgtcatggtttcgaagtccgaatcgctcaactccgaaagataccagtcggagttttcgcccgaatgttgggcgaacttcatgacgagctcctggtttgggtaattgcccgtgatggtcatccagttttggaagaattcgacggggtcgatctcgggcacgccgcgctctttgaggatcgaggcgttcagcgccgcgaattcgttgccgactgcagcgtaggtgtcttcgggttgcttctcgacaaggatgactttgtatccctcttcggcaagctcgcggcatgcggtgatgcctgcgaacccgtggccgcacacgacgacgtcgcaatcgtactccttagcgaattcggtaatctcctcgggtgcggtcttccagctcgattcggaagcggccgacccctgcgcagcttgggcggagccgccttcgctcgatgcaggtgagcagccggccagccctgcgccggctgcgactgccgccgttgccccaagcccgagaaacgcgcgtcgtgagattccagatttcatgatggtcatgattcctcccttgtctccttgattcagtgcccatcttcgctcgcggctgcggtcgattcttttttcgaccgacgatcgcgagtgctcgaatgcatcctacggggctcatcgggttgcgaaaatcgctgcgatgggggaattgcgcgatagcgcgtcgcctgaaaccgcgatgcggcccgtcgaaccgcatcgcggttttggggtagtaagggagaagcagcaggtagaagcacggcttagcctcgtcttgtcgccatgcggtctttaggaaggactttgatttctgccgatgcttgcgacgcagattcgctcgcccagtacgggttttgcggcggttttttcaaatacgggaatgcggcaggagccttgaaagcatagaagcacgcttgcctttcgcggtagctcgaacccttgcgctttgcgacgatcaagcgtttgacctcgttgtgaggtatactgggacggaaaaacgaccgtgtgcagctggaagggagcaggcgggtgcgcttctcgcaggagttcagactcgaaacgctggcgttcatcgccttcttcgcgacgctcccgttgtattctcccaatctcgttctgttttcggagtacggtgccgcggatgtgcttatgccttttttcgtgaacacgatgatggtggctgctgctttcgtcggagtggtttcggcatggttcgcttttcgccacgacgcgtctctgtttacgtccccgcagctcgtcatcgcctcttcgatgctctacatcggtggtttcgccctgttcgttgcgggccttggcatcgaggggttcggatccgaaggcgtgatggtcgcagcgggtgccgccgtcgcctgcggtatggttccgatctgcatcgcgtggggcacctacctcgcaatgttcgatctgcggcaagcgctgttctatctggccatcatggtaggcgtatcttcgttcatcgcgctcatgctctcttcggtcgccatcgaaccggggttggtttcgtttgggctgctcgcactgatcggcgtggcccttccctgtgcgaaggcgacgggcggaaagctcgatcgcgccgtcgccgatgctcctaaccgcggcgaccgcgaactcggttaccttatcggcgatgcccccgtcgcgccatccgattccaaatccggcgtacaggatctccttgccagcgtgcgtaggatggcctcggttgccgcgttgccgttcatcggtctgctcgtgttcgcgttcgtgatgggcgtgcgcaagttcatggtgttcgatacgttctacgttgaaacgctcggcggcatcgttgcggcggtcgtcgtgcttcccttgagcctgttcaaaatcgatcgaccgctcatgtcgtttgtttaccaggtgtttctgcccgtctgcgctatcgtgctggtcgtattgaacgcctttccctacggaactgcagcccagtggcttgcatcgacgctttcgtatgtgttctacggcatcataggcattcttgcgcttgcaagcctgtgcgcgatggcccatgcccgcgagttctcttcaccgttcatctacgggcttacggtcgcatgttttatgatcgcttcgtttctgggcatattgttcgggtcggtttccgagctttccgagaacgcgggtcccattctgctcgttatcagcacggcgtacttcgggtttgtcgtgctcgctcctttggcatcctcatggcgaagggagcgagcatccgagctcgaagcacgcaggggggatggcaaagaagcgcagagcgagctgcagcagcgcattgaggcgacagctgcgcgcttcgagctttctccgcgtgaaagcgagacgctggcgtatctcggccgcgggcacgggatcgtgttcatcgccaaaacgcttgtcatttccgaaagcaccgtgcgcactcatgtgaagagcatctatcgcaagctcgacgtctcgtcgcgcgaagaactgctcgaactgatcgatcggggataagtcggggatagaatcccgcgccgtattcttctgaggtttcgtttcgtacatccttgttctcttgttctctggcatatcagcatgtaaaatgcatgcatatagcatgtaagagagaggatgcgccatgcccgcattgcaggtgcgagatttccccgaagatctgtacgaagagcttaaggagtgcgccgatcgtaaccatcgcagcatagcccagcagacgatcgtcgccgtggaggagatgctcgaacgtcaaaatgagttgtacttttgggatgggaggcagctacatcgtcccgtatgctctaacaccctcgactttgacagtgaagcacagcgtgccaagcgcatcgcgaagcgcttggcgctgtttgagaggatcggtgcgttgcaatggcatggtcctaagccgactgcagacgaaatcgttcagctcgtgcacgagggtcggcgggagcgcgaccgccagataagcgatgccctcaagctgtcttgcgacaaggaggtgtgagatgattgttctcgactgcaacgccgccatcaatatgttcgttgagactccggaaggaaagggacttgcggagttgctcctcgagggagaagccgtcatctcacccactttcttttgcgcagaagtcacgcatgtgctggaaaaacgggttcggggcggttattcggacaagaaggaagcgctcgctatgggttgcatgtgctttgcccttgtcgatgagttcgttcctgatgcaagcctatgggaggaggttctgtcggaatccctgcgtttggagcattcgtcgtacgaccttttctatttcgttctcgctcggcgcagaggagccaccttgttcacacttgatcgcaggctgcaggagctctgcctggacaatggggtagactgcatggttgccgatgcgaaattctagcggggcgatcgcattcgtttttcatgaaaaggtgcgttcgggggtccgtttgtacgcgttagcaagtacaataattaggtttgagtgacgttcgccgctgtcgggcatccggggggcgaataaaaatagcaacgcttgaggagcaagaacagatgacggactttacaaacgagtactgcatgcacaccgcgacgtgcggcgaattgcgcaaggaagatgtaggcaccgaagttgtgttgacgggatgggcttggcacaatcgcgatcatggcggactcatcttcatcgacctgcgcgaccgcgcaggctacacgcaggtggtcgtcgaccccgattgcgtgagcgcggatgattttgcgaaggcggagcatctgggtcgcgaatacgtgctcaagatcgtcggcacggtgcgcgagcgcggggccgatgcggcgaacccgaacatggcaaccggcgatatcgaggtgctcgccagctccgtcgaggtactcaacacgagcgtgacgccgccgttttcgatcgaagacggcattgagaccgatgagactacacgtatgaagtggcgttatctcgacttgcgccgccccgagatgttcgaagcgatccatcttcgccacaaggttgcgcaggccatgcgcaccgctctgaacgagcgcggcttccttgaggtcgaaacgccgatactcgcaaattccacacccgagggcgcgcgcgactacattgtgccttcccgcccgaacccgggtcacttctatgcgcttccgcaaagcccgcagcagttcaagcagatgctcatggtgggcggcatcgaacgctactaccagattgcgcggtgtttccgcgacgaggatttgcgcgccgatcgccaacccgagttcacgcaggttgacatagagatgagcttcgtcgaagaagatgacgttctgaagctcatggaggacgtcatggccgaagtgctgagcgccgtcggcgtcgagcaccagttcccgcttgagcgcatgccctacgcggaagccatggaccgctttggaaacgaccgtcccgatacgcgtttcggaatggagctcgtcaacgtcaccgacatagtgaaggactccgggttcaaggtgttttcgagcgtcgcccaatcgggcggtatcgtgaaggccatcaatgcaaagggcgcaggcgactggagccgtggggaagtcgagaaacttgccgatatcgctgccgaaaacggcgcgaagggcatggcttggatcgcgttcacttccgatggcaacgagaagagcccgatcatcaagttcttctcggatgaggagtttgccgcgctcaaggaggcgcttgccgtagagccgggcgacctcgtgctattcgcggccgataagcccgaggttgccaatgccgtgctttcggcgctgcgcctgcatatggccgatgccctcaacgttccgcgcgaaggccacaagctgctttgggtcgtgaacttccccatgttcaagtacgatgaggatgagaagaagtacgctgccgaacatcatccgtttacgcagatccgctacgaggatgtcgataagatcgaggatgccccgctcgaatgcggcagctattcctacgatctcgtcatggacggcttcgaagcgggcggcggcaccatccgtatccacaacgccgatatgcagcgccgcgtgctgcgccgtctcggattgaccgacgaggagatcgacgagaagttcggccacctcatccacgcgctcgaactcggcgcgccgccgcacggcggcatcgcactcggcctcgaccgtctggtgatgcttttggcgaacaagaaatcgatccgcgacgtcatcgcgttcccgaagacgagctcggcatccgatccgatgaccggcgcaccgagttcggtgacggcgcgtcagctcaaagaggtcaacctgcgcacgctgtagcggcgcaagcgcatcgagcgatagcgttggcattgcctgagccggcagccggcatactgtgcatcgattttatcgggtttgtcttttcgccgaggccatccgcttttgttttcggcgcccgagggcttgcatgtgttaatgatattgcgagtgcgaacaggctcgccgtcgaattcgcgataagcgatctacggtcgagtctgttcgcttgtttgcatgcgttttgtagacgctgcttgcacgttactgtgtaatgtgtttgcctgcaagatatccgtaggtgagcgccgcagcgtggctagcgcccgaaagcgtgaaggggtaatcttcgacaaagcgtccaccttgcgtattgccaacggcatagaggccggcgatgggttgcagctcgtcattcgtgatcaggtggaaaatcctgaatcgagatttcggttgcgttttggttgcgcagtgcaataagctcttcgcgagagctgactttcagtttcttatatatgttgcgaatatgcgttcgcgctgtattatccgagatgaacaatgtttttgctatataccgcgaaccatggcctaaggtgaggtacattagtatctcgcgctctcggttggtgagcgagcgagcgtcggccaacgcttctatccgtgcgattcgttgcgactcttcggcttccgaagcggcacgtgcttgattgccgacggatacgtcttggggatggcaaagctggcgccaagacgaataacccagttgaataatgaatacggcgaagtagcagcaaataagaacccataccatcggccccgcctcgtctgacgtggtaacctcgccacctggaattacgccaatgagggtaagaaggttgctggcaaagaacgcggctccgaaaacgaaggggagtgaaaattcacccgcatcggcaattgccaccagggaagagagagcgaaaagcgacaggaacatcaggggcacaaacacgtaggagcccccaacaaggaaaaaggacgatccagctggaaaaccgcctagggctattgaaatggccaccaaaactggaacgatgactttttcaacaaggaggacaaagggcctgttcgtcttgaccaagcagatgccgagcgcaattaccgaggcaccgattcctccgataagctcagtgcgcatggtggttccgttgagggtgaatgccgaagacgcggacacgaacaggtacagcaagaaacccagcagcggtagccagataaccgaaagcaagttcttaatctgggaagagagcggtatctcgggagggttggaagctggggtgcattcgccctcgccatcgtgtctggagtcgttttcggaagtcgcctttcgggttcgcaagatgataatcggggcaaaagctccgctgcaagcacagaaaagaaagagtggacctgccagataatttgggaccatggaaagcagaacgccgatcagtgaagagccgatacaggcaagcgccccatgcatcatgacgtgttgcacgctgccggcgtatagtcgaatccagctcatcgccacgggcatgcatcccagccctgcaataatgccgaggcagctaaacaaagcaggtagagaaaaactgcggggcaggagaaaaacgagagctcccacagagatgctgtaaaacaaagcagcggttagcgaggcgggaagcccgaagccgttccattgcgggcgatgggctgcgagcaacatgagcactgcggagagcgttaagcatgtagctgccatggcaaccaccaaagggaaaagactggccatgcctccgatgagatcgcccatgatgcgcgcattcggcacgtagagcggcatggaggccagaaacggtgcaagccacaagagcgatggctgaagcttgagctcgggtcgtttgttcagatgctgaagatacgtcgcggtctcattcaatgtcattccctcccatgggatcattctagcgcacccgcttttgctcgcaaggaaaatccccttatcagagcgagggtgagggaaaaatactgcaaaatgttgagacggatcacgcaccttggttatcgactgcacggatcttccagtcataaagtttgctcgccgcatatgggattgcggcaagaatgaaacatgatgtaaggaggggaaccatgcacttcgatgaaaagcgtgacttccgagagaaagaagagcatacgggaaaaggggtgtctcgtcggagctttatcgcgggttcggcaatggctgcgttgggtgccggagccgcggcgatgctcggcggttgcactcctcaaacgaaagcggaggaaggcggtgcttctgcgggaggggatgcaggcgagggcttggcgccttcgccatggggcgactattatccatggcctgcaaatgctcccgagatcgcggatgaagacatcgaagaggagctcgactgcgatgttgcggttgtcggcctcggcgtatcgggcgttgcggcgtatcgcgcagccgctgaggccggcgctaaggtcatcggcatcgaaaaagctgctacctatcagcagcggtcaagtcaatactgttatctgaacggcaagtactccgcgcagcttgggctgccggaactcgatctagaggagatcgtagaggaggagttcaaggagggcctgaccgccacgaactactctatcattcgtcgtttcgtcatgaacgacgccgaggcaatggattggtggatagagggtggagacgtttacgtgccccagatcggtgaggttatgggtggcaatcctatgacgggcgaggctgacccgaatcatcccaacaatgttacgtctatgagcgaccctgctcttgattggcgaaacgaacgccaggccgcctatcctgagtgcttgaatttttcagaccatcaggctgttcttgacaacaatgctgccaaagcggaagcgaaaggcgcacaagcgcttttcgggcacttcgcggaaaagcttattcaagatgaaagcggtcgcgtggtgggcgtgtacgctcgcaatgccgaaacggataagtataagaagatcaatgccaaaaacggcgtttgcatggcgagcggttgctgtcgttccaacgaggatatggtacgttacttcgctccaaatctcattttcaacggcaacggcaacccatggccgaacatggatgtcgagggtaatcgcaccaatactggcgacgggtataaaatgggctactgggcgggtgcttcgattcagcagaaccagtgttcacaggtgcatgtcatgggcggtcccggcgatgatgacgaccaaagcaaatccatgggcttcacagggccgatgctccgcattaactaccacggcaatcgattcatgaacgaagacacgtgtgctgccgatgccgaatacgcgcttgagctgcagcctcagcataagtgctttatgatctgcgattctcacttcgatgagcaggcgccgcagtgcgtcaataccttcgccgcatcgttggccgattgggatgctcgcgtgggagacggtaccatcttcaagggcgagacccttgaagatctgttcaactcgatcgacgggatggataccgaaaacgcgcttgcgaccgtagagcgctacaatcaaatgtgcgcagcgggcaaagacgaggatttcgccaaaaaagagaagtatctctggccagtgcaggatgggccgttctacgcgcagcgcatgggcgtgggcctttgtctggtaatgatgggcggtttggagtccgaccacgaggcgcatgtgctcgatgtcgatcgcaacgttattccgggactgtacgcatcgggcaacattcagggtaatcggtttgtgctcaagtatcccttccgcttgtccggccacagccatgcaatggccatgtactacggcaaaatcgccggcgaaaacgcagcggctggtaaatagcgaattcatcctgagacggcctctcgggccgtcccaccttcgtgttgcttttaaagaatgcagggtagagaacggtcggaaccgctaccctgcctggactctgtttgaaggagagaaagatgatcgatgaaacgaacggaaagcctgggagcctatcacgtcgtgggtttctgacgattggcggcattgccgcattgggtgcgggcgcagcgcttgccggatgcgctccgtcggcggcctcttctgacgaaaaaggggaggggctctcggcgtctggcgaagaacccgaagcttccagctggcgtacgcctcctgagccaattacggaattcattgacgagcaggatttcgacgtagtggttgtcggccacggctacgcgggggtttgcgcttgtcgcgagctggcggaaagcggcgtgaaggtggcattgctcgagcgccagcccgaagatacctatgcagcatgcggctcggaatccatggcggtgaactcgaaggtcttggatcgcgcgaccgagggcaatccaataccgcacgtggacatgatggagtatttcgaaaactggatgacgatcaccggcaaccaggcgaatccggcgcttgttatgaagtatgttaaaaacgagcccgacaatatcgactggtactatgatggcctcactgatgaggattttgcggcggttacccataccggttggccagatgctggggattcatgggagcatatgctttccggcatcgggcctatccgcttctatccgggaacgttttcgtgcttcgctgaggagtgcaaccaaaccaaggtgcagggctacaatcgcgacaaggcgaaggcagccggcgcggagttcttcttcggcatgcgcggcgagcaattggagatggaggacggcagggttgcagctgtcgtcgcgtccgatgctgagggtggctaccataaattcacctgtcgggcagctgttctggcaactggtggattcgcatacaacaaagagatgctagacgatctcatgcccgacatcgccaacaacatggttgagggcgagcagtggctggacgctttcggcaacccgcgcttcgaaagcgatgcgtcgcagtggccctatcagggcgacggcatcaagatggcgctttggagcggtgcacacttggagacggtggtgcccggtatgaacgcacgtcacatccaggcgcccgcaagcatgtcgaacttgccgcaagcggtatgggtgcgcaatgatggaaagcgctttcaaaacgagttctatccggttgtcgaacagcgcggtagcgtgaacgtgtatcttccccgcgagcccatcaactgcattttcgacgatgatttcaccacgtatcgtcagtactatgtgccgcaacacggcggccaggagcctacgccggcagcgcttcagactttgcgcgacaacatggataaggcgtatgcgaagttcaagggcacgtgggaagaacccgaagagaccgagggcgaagggcagatggcttggtttgccgcccctgattacatcgccgacgatacgctagaggggttggcggctcagctcgggtttgaagatgacgccgttgctgatttcgtcgagcagatcgagcgctacaacgggtattgcgaaacaggcgttgacgaggaattcggtcgaaacaaagaggtgctgttcccggtcaagacaccgccgttctatgcagccgtcggtaatcccggctttggtgaaacgatggcgacatgcggcggggtggtaaccaacgctgatcaaaatgccttggatgacagctatcagcctattcccgggttgtacgtgtcgggcaacgactgcgggcggcgcttcggtgccgagtactgttcgccaactcccggcgtatcgctgtccatggcaattacgcttggacgcgagtgcggcaaatcggtaaagcagtatcttgacgccagctagcatgcagtcgcattagctgtttggcgaaacggtccggagccttgtttcttgcttcggaccgtttaccgttgcgcgtcgatgctgagggagatgcttgcgccaacgtgctctttcgcgtcctgaagcaagcccccccgcaagatcgaagccgctttctaaaccgcgtggtgtattcgcgagccgtattcgtggaggaaaccaatcgaatcgggcttttccgcggttttctcttgcggtcggagccattgctcatcatgatgagtcgactgaacacgcagtgcgcatcgcccttgggcgatgacgcccgatgagagaaacgagttccgcatgaagatcgtcgccgactcctcggttatgtttgacatcgagcagggaaaagaacgcggtatcgagatactgcccctttcggtcgcgatcggcgaagagacgtgggcggaatacgaacaaatcagttcagacgagtttttatcccgcgtgcgcgccggggcgatgccgcagagcgcctcgccgtcgccttcggcaacgcttgcggcgtacgataccgacgaggaggtcgttcacctgaccatggcaagcggcctttcgggctcgtacgaggttgcgtgcgggctcgcgaagcaggcacggcatcccgagcgggtgcatgtggtcaactcgcgcacgctgtgcataccccatcgggcgctcgccctttgcgcggtcgagtttgccaagcagtgcgagaaagccgaggaagtcatctctcggttgcaggcgatgatcgaaagcgcccattcctatttgattcccgaggatttcgattacctgcggcgaggcggtcgcctgactccgttggctgcgaagttcgcccatcttctcaaggcagttcccgtaatgatgcaaacgcccgatggcgcgcggctcgagcgcatgacggtggcgcgcgggttcaaaaaggcaatgggcgcgatagtcgaggatttgaagaagcgcggcatcaccgattcccattacatcggcgtgagccatgcgggcaactatccgcaggcgcaatctgccgccaaagcgctggcggaggcgtttccccgctgcgcgagcgggatattcgagctgggtcccgcgttcatcacgcagggaggccctgattgcatagcggtccaggtcatcgatttgaaaaccgtgccgagcgtggcgatcgcgtaaaggacggggcatcgtacgggaatatcgaatcggatccgttgcggttcgggcgatgcggctgctgcttgccggatggcccgccgggatggaggtcgtctgccaagaaaaagcgccgggggcttcccggcgctttttcttggcatgcggttttacagtccgtcgatgtaagcgaccagatcgcctacggtggcaagcccttcgggttccccgaagtcgatgtcgcatttttcttcgagatcgcagatcagctcaaccatgtcgagcgaatcgactccgagagaatcgaacgtcgaatcttcgtttacctgatcgggggcgatatcgaggttctcctgcaggatatccttgacggtatcgatggtggccattgcgtgttacctcctgttcttcgatggaaccattgtactagagcttctctttccgcgcgcctgaaaacgcttgacggtttttcggcggctgctgcgacggatcgcccctttctgctgcttgtgctaccatggccgcacgggatttcgatgcacgaaaggatgcgcaatgtcgatcgacagggttcgaggctatttccgagagcggggtatcgaggacgggattcgggaatacgaaacgtcgagcgcaacggtggagcttgctgcgcaggcggcgggctgcgagctggcgcgcatcgccaagaccctttcgtttcgcgttggcgaagacatcgtgctggttgttgcggcgggcgatacgcgcatcgacaaccagaagttcaaggcgcggttcggatgcaaggcaaagatgctggcattcgaagaggtcgagcctgccatcggccatgcggtcggcggggtatgcccgttcgccgtgaacgagggcgtcttgatttatctggacgaatcgctttgtcgtttcgagacggtctttcctgcatgcgggagcgagaacagcgcgatagagcttgcgattgcggagcttgagagcctatcgcgctcgcttgggtggatcgacgtatgcaggcttaaagaagcctgatttccgaggcgcgcttgccgcttcgctgtttcggggtataggttgtacgggagcaaaccgcgcgcggtgatgcgcgcccatcgtaaggagcaggcatggagttcatcgatcttgcaaggcgtcgctgttcggtgagggcgtatcgggacgagaaggtggaagaggaaaaaatcgaagcaattctgcaggccgcccggattgctccgtcggcctgcaatcggcaaccggtttaccttatcgtcgccgaaggcgaagagcgaaagccgcttagcgacttcgtttcgttcgagtcgttgtaatcgaggtcctctgtggcgcgcgatacggttttctacgttgttcggcacggacaaacgctgttcaacgttttgcagaaggtgcagggttggtgtgattctccgctgacggagcagggggtggccgtcgctcgcaagctcggcgcaggacttgctgcgacgccgttctccgctgcgtattcgagcgatagcggtcgggccgtggctacgcttgaaaacgtgcttgagctaaatagggccgcgccgcagcctcggtccgattggcggttgcgcgagtggtgctacggcgatcttgagggagaaccgggctcgaagctccatgacgtacttgctcaggggtttggcgccgatctgccgatgacggagctcaacgggcgtttgcccgagatcgccgatgtgctggccgatcgcgatggatcgggtcggtcggagcgcttcgacgcgatcgaggatcgggtaacctcgtttttcaccgaagcgggtgcgcgcgcttgcgcttcgggcggcggcaacgtattggttgtcacccatgcgttcacgataaagacgcttttgtacctgtacgcccgcgatcgggtgaacgagcggccgaaaatcgagaatgcaagcgtgacgaagctgcggttcgatgggatctctttcgaggtgggaacgatcggcgacaccgcatacgcacggtaagggcgtgcgtatgcgggcatcggcgccgattcgcctcgcgcagtgcgcctcccattgcggtatcattgccttttgacggaaaacggtgggaggatgcatgacccgatcgggtatccgatcatatctcggcattgtaaagaggcagtttcgcgaggcgccggcgtcatggctcgcgttttcggcgctgctcgcgtggatgttcggcttgtattggagcgacctgttcgtcgcccgatcgtttacggcgcagttcgatttcctgcaactgcgtgcattgtggcttgccgtcgaggctctgacgctgattgcggcctatgcaggcgcgcaccttgttttcagtcgatcggcgcccatcgccgtcggtgcgggcacgcttctatttgcgggcaccgttctcgtgctgttcgctcccgccgaatcggcctccgatggccttcgaatcggcggagtggttctcacgggtatcggcggcgcggctctccttgctctccagggaatcggattcgcccgaaaaggcccgaagaccctgcttgtcaacgtggcccttgctttggcggcagcctcggtcttcgattcgatccttttgtacctgccgcatgcgctccagccgatgatcgtgtgtctgctcccagtcgtttgcgtggcgcttcttgccgtgaggggcccggtcgatcctgcttgctctgaattggaggtagatgcgcagggggcagcgagtcggaaaagaacgctggtcgttcgcatcgttgcgctgccacttgtcgtcgggcttgcgtatgggcttatgcagcgtctgacgagcgatgcgtacacctcgggagccgccgaggtgaacgttgcgacgatcgtttcgtttttcgtttcggcgattttcatcgcgcttgccgcactgttcttcgattcccgcaagctcatcaagctcgtatgcttcgttgcgataccgatcatcggcatcgcctttgtaatgctgccgctgttttccgatgcgggcgaagctgcgcaggctatttgcatcatcggtttcaacagcttctatttcatggtatgggctctttgggctggcgatcagggaggcatcgctttgtcgaagcggtttgtccttggtttgtttgtgctggtgggggcagagtctctcgggtcgttcgtcggcatgcaggttgttgcggcggtcagggattcggggtcgacgcttgccgtggtgtcgcttgtggtcgtgtacttgctgcttatggcgggaatattctcgttcgatcgctcgggtggaggtatgcgcgaaccgcaaaccgggcaaaccgaagatgcggatgtccggcaggcggcgagcgcgggggctcctgtgctcgatcccgtcgcttcgaacggcgaagcggagctcgccgattgggcaaagcgctatcgtctttcggctcgcgaggccgaggtgttcgaactgcttgccagaggacgcaacagggtgtacatttcgaaaaccttgttcatctcggataatacaacgcgcacgcatatgaaaaacgtctaccgcaagctcggcgtgcattcccagcaggagctgatcgatctgcttgaagggaagcacgagagtcgatagcccggcgtgcggagtgcgttggcccgatcgtctggtcgattcccgcaagtggtttggttttcggatgatgcggacggcgaggtggacgttttcgtttgaatgctgataggcggagacttcaaaggtctccgcctatcttcgatttcgggcgttttggggcttgtcgcggggatcttccgtgcgactatcggggcctatgcctcctcttcggccaaggcgttttcgcctgcgctgcggccgaaggcgagcgtggcgaggatgcccgtgccggttccgggataatacgatcccatgaatcctcctgcaacctgtcctgcggcgtacaggtgggggatgacttcgccgttcgtatcgataacctgtgcgcttgtgttgattttcagccccccgagcgcgccaaggttgtaatcgtaggtgcgggttgcgtagtagggcggcgtatcgatggtttcaaggccgcatgcgcgggttgggaactggctatcggttttttcttcggttgacatatcggcgttccaggtatcgagcgccgcctgaaggttggcggccggtacgccgatctgctcggcgagcgcttcgatggtgtcggccacgagcaccgaaccgtcggcgatctctttggagaagtcgtcgctcatggggctgactccgcctacgacggcgccggtaagcgcagccgccttcgaatcgaagataccccaagcaatatggtcttcctgggcaaacactgcacggagcacccacgcgtagtgatcggactcgctcacgaagcgacggccgtacttgttgacgatgatgccgggaacttcgggaacgccgggaagggtaggcgtgcccccgatgttcccgggcagcccgatgaatccgcccatgccgtcgagcgccgcaccgaccgccatgcccatgcgcaggccgtcgccggtgttggtggcaacggtgagggagcgaccgtcttcgagagcctgcaccatgtggtaattgaatgctttggcgaactcttcgctgcgatcgtagctgcacgttgccaagatgacggctttcttgccgcggtagcgctttttgtcgtcggctacgacgccggtgacgactccgtcagcgttctgcacgagctgctttcccgcggtgttgtacacgaattcgactcccgcgtcttcggctgctttgagaagcgccgctacatgggcctgaccgtacatgaggtcgttctcatcggttcccgcaagatggatgcggggtttgatgacttcggggtcgacgttgggaacagtgccgttgccgtagaccacttcgtatttgatgccgagttccttcatgaattcgatgcaggaaggcgcctgttcgcatgcgtagcggacgagttcttcgtcaagctgcccttcgccgcattgcagatagtactcggcgtgtttttcgggcgtgtcgtcgctgacgccggcgaactctttctgctcgtcggtacccgctgcctggatgacacccgaagagttggcagtgttgccgcccgccatagctgccgcttcgagcacggtaacctgtgctcctcccttggctgcgactacggctgcagcaagacccgcaccgccggctcctatgatgaggacgtcggcttcgtgatcccatgttcccgaatcggccgcaggttcgttgccgttgggcgagcatcctgtgattccgaacgccgccaaccccgccgctgcgattcccgctccagccaaaaagtttcttctcgtgacgcttgtctccatgattccctccaattgaatcgatgacgtcgctttggtgatgcgatggtcgaaactataggatcgagggaggtctttgggatcacataggtgatgtgaaaagcgatgtgaaagatgcaaaaaagctgatgggagccttgctggtttggtgattcccggccgctcatttcgatgcggctcttcctatcagatgtgaaaaccgggctttgtcgtcgacggcgatcccgatcgcctcaacggttttctcggttccgaagaaggtttcgattctgacgggtttcgcgaatacgagccacccgctgggatttcccatcacgccgaggtcgatgagcttcgccttgtccgtttcgggagctctctcgacgaaagctgcaacggcatcaagcggtacgtcggcggaaaagcgcatgcccgaacgaatctgcacgacgtcgttcttaacggctatggggttgaggatggatgctcggcagtcggccagagcggctcgggcggttgcgttcggagcgagggcgattgccgctgcgccgaacaagtagagaagagccaggcatgcaagagcgattgcattgggagtgctattcctgatgtcgggcatatccttccccttccctcgtatcgatcgaatgcggatcggcctgtttgtcgttcaggttcctcatgcttcgggcaagcagggcgcatgcggtgatgacgagccatgcggtgacgagcgcccacgaggcaacttcaaggcctatccccgaaacgagcgccgaggttgcgaagagggcgacgggtgcggcgatgagcaagagcgagttctgcgtgccgagcgcgcttccccgacggttttcggggatcctgtcgaacatgaagaatccgagcaaagccgatgccggtcctgcggcgaatccgagcgtgaatgctcccgcaagcatgatcgggtagctcggcagcgatcccattacgatgacgcctatggccatgccggacagcgagaggacgtaccatgtccttcggctcagtttctgggtaagcgcagcgtagacgagagatccgacgagcagtcccaccgacatgacggaaagcgtgtagccgagaagttcgggcgaattcgcttgggtgaagaacaccggcagcacgagcccctggtagcttcccatgaccatgacgatgccgaaggtcatgagcgttgcagcgcgcaaaacgggatcgcccttgaacagaacgcgggcaccttccatagccgaagtccaggcggccttcgcaagcgagcccgcatcgaaggcggtcgtcgaacgatcgtgcgtttcggcaacggaaacctgcgaggctgaaagggcgtcttgattcgctggatccgcgttcgaatcgacggctccgactgaacggggaagcgtcatggtcgtaagggatgcgcacagtgagagcgctgcggtgatccatagacagggaaccgagccgataacgcccatgagcagggcggcaagcgctggtcccacgatggttacaatggaatcgagcgactgcgtgagcccaaggaaccgctggagatccacgccgtcacgttcgacgacggtgggcagcatcgcatcgcgggccgtcatgccggggatgtcgcctacggctccgaggatgccgaacagtacgaaccagccgaagctgagtcccaccgtcatgtcgatgagggggagtgccgctacgcagagcgctgaaacgatatcggagacgatggagacgttgcggcggttgagcctgtcgagcacggctcccccgagcacgcctgcgagcacctgcggcacggcgcatgcgagggcgagcgtgcctgctgcaagcggatcccctgtggtggcaagcagtatcagcggcagcgcgatgccggcaacggaattgccgagcagcgaaagggcgctggcgatgaggaagcgtatggtggtggactttccggacatagtgtttcctttcttctcagaaaggagtaaaaacccagacgttgcgtccgagtcaagggaagtcttggaaatagtggagaattgcgaaacgatgcagcggcactcgggctgcttatccgggttcccgctattccgatcgcatcgactttcccgttacgcgcttctggattatgtcgatgacgcgatcgcatacgtctttttgagcaggggtaagcgcctgctcctggtactgtttgaatatcgcttcggcacgcagttcctcttcggtggggtcagcctcccaattcgatgtgtcgaagcaatccatgaccctgtcgatgacgccgatgaccctgtcgatgacggcagatttctgcgcctcgtcggcatcttcgggcaggtcgatgatccagtcgtttatcttgatgtagtcgtcgacaaggccccgctcgatgatcgcctggtacaccgcctcggtctcgtcgagatccgattcgctgagcattgcgccggctaacagcatgacggtgcgttcgcttctcatcatatcgtcgggcagcccgtgatctttgagcgtgctgatgatcgaggcgagcctcactgggacgtcggcatcgagttcatgggatctgatcatggcgagcgttctgcgtttccgctccaaaagctcgatctgtccgacgagttcgcggtcgagtgattcgagcaggtcggcagctttcgagcgatcgtcggaatcgagggtttcgagcatgcccccgatgtcttcgagcgagaagccgagcgaggcaagatgcttgattcgcaggagccggacaagatcgtcgatcgaatagttgcaatacccgttgtctccccgcttcggttcgggaaggaggccgatcgtacggtagtggcgcagcgttcgcaccgttacgccggcgagttgtgcgagctccccgcttttcaaatcggcctcctttgcagttctcgcatgcggtgcagcgcgtgcgaattcttttcttaacgcggcgcgcgaaccatggcgcgctcgtacacgtcgaatttgggatcggtgaagcgatgcacggtttcgaacccgaagtgcccgtacagcgattcgaggcgatcggtgtagcattcgaggtagcagttgagtccgtgctggtcggcgtaatcgagaaacggggtgacgagcctgcggaatgcgcccgatccgcgcatgtcggggttgactccgacggaaaagaagtggatgaaatcctttccttcggtttccgggatcatccatttgaagttggagatcggctccatttccacggcgcgcttgtagagcgccgttttttcctcttcggtcagtaccgcttctgccatcatctcggttgcctggtcttcgagatcgctccagatgttgcccttgagatcgcttgaaaggtaagcgcctgttcctgcagccatgtcgggcagcatgtagcagcattcgaagggggttcccacgatgaagtcgtacttcatgatggcgcgcgatatctcgagcttgcgatcggcggtcgtgccgatttcgtcaagcgcttcgagccatgcttcggtccagagttcttccatgaagcttttccccatcatgcaagcgagcttttcgatggtttcgatttgatcgggttcaacggtaacgagtcctggcagttgcatgacgtgcatccctctcttgttcgggtctatgggtccaacagccgattctgccacaggttgacttgcccgtcgagtgtctggccccctattgcggaagagctgcatgaatcgatgcggacgggttcggcggtttgtgctgcacgaaaccggctgggagcgggtgggaaaggctatgggtaacgggaacgttgttcggtcgcaccaaaactcactcgacaacgttgtgctcattggtatgtagaggaccgcttttaaaacttgctaactgctgatatcgttgatatcgttcttctcatgacacaaggaggagctatgtccgatttgcttattcggaatatcgattacgagacgaaacgtgctcttgtcgcccgcgcggctcgaaacggccggtcgcagcaagcagaggcgcgagccattatcgagtctgccttggacgaagatacgtgcgattgggtttctctgttgcgcaatgccgctgcgttgtccgacggcatcgaaatagaggttcccgcgcgccattctgctcgcgttctcgataccgaaggctggctatgaagtatgtcgccgacaccaatgtagtgtccgaactcatgaagaaagaaccctccgttgaagtcgttgattggtttttcgatcatgaaggtgatgtgtatcttacttcggttacgataaaagagctgtacttcggcatgctccgacttccggaaggaaagcgaagacgacgtttggaggaaacgataggcgccatagcgctcgactgctccgataaaacattctcgttcgacgcgctcggtggctatctgtgcgcccgcctccatgagctggctcttgccagtgggcgaacacctaccatggaagatctcatgattgccgccatatgccagcgtaacagcgcagtgcttgctacgcgcaacataaaagatttcgactatctaggaatcgaagcagttaaccccttcgagccggcggcgcggtagacctgggtggcaatctcgagcctccgcattcgaaaggatgaagttcccagccccgttggctagcgcacccgttcgattttcacccgaatccctccgcggagattcggaagcccctgtgcggggtcgaggttccatggctcgtcggaaaacagcatgccgtcgttgtaaaggcatgcgccgctcaatcccttgccgagtccctgcggcgtttcgggcttccaccagccatggggaaccctcagcgtgccttcgggttgccgttcgtcgatttcggccagcagccgaaccgatccatgcgctgtcgttaccgtcgtccagtcgccttcgcctattccgaagcgctcggcgtctgcaggattgaggtacgcttcgggttcgggctccctcattctgagggccggtatctggtggtggttggtgttgtacgaacatttctcgcgcactccggcgaacacggtcagcggatactccgtttcgtctgcgtcgggttcgctcgggtcttcgtaggacgggagggggtcgcagccgagcgcttcgagcaccgagcttttcagctcgaccttgcccgacggggtgagaaacgcgccagcggcgatcgggcggcagggttctgctggccgctcgctcgcctctgcccacgttttcccgatcggcgccagccgaaaatcgcacagctcgtagcaatcgcgccagggaaacgcctcgtccaaacccagtcgatcggcgagtcccttgatgacgaaataccaatcccggcattcgcccacaggtttgcagaaggcctggcagaacgtagttgcgggcgcaacgtcgaaggcgggtcccatggtgtcgcgctccatccacgcatcgccggggagcgcataatccgcaagctgcgcggtcggcgtcatccagtgatcgtatacgacgaccagctcctgggcgagtagcgcctcgatgattccctgctggttcgcgtagctcataaccgtgttgttgccgacggcgaaaaacgccttgatcgggtagggccgcgccgttcgcatggcttcgaaaaggcttgcgggatgggcggtgcaactgcagcccatgatgtcgggcacgtgatccagacccgccgagcggcagggcttctcgtagagatccattcccttgaagctgaggagcgggtaggcctcggagccgatctgcttgtcgcgctgttcctgggaaagggcttcgtaatcggcgagctgggtattggaaacggggccggtgctggggccgaccacatgctccgatttgttcacgaatccgcacaaggcccgcaggatgcactggcagcgcagaacggaggtggagtttttctgcatgtcgccgaccacgccccatgggatgatggcggcgttggcgttcgcgtaaagccgggcggtcgtccgaatcgtttcggcgtcgattccgcagagggatgccgcggtttcgggcgaataggcgcgggcgcgttcggcaagctcttcgaatccgatggtgcgattctcgacgaattcgcggtcgtacaggccttcttcgatgatgacgttgatccaggcgagcagcaatgccccgtcggttccgtaattgatgcggaggtgatgatcggcaagcagcgcggtatcggtgatgcgggggtcgacctcgatgagcttcgctccccgtgccagcgccgctttcagtttgaggaattcggcgggccaaagctccggcccgcgattctgtccgaagtagacgataaggtcggcgtgctcccaatcggcggcggtgtaccagccgtacgtcgcacggtgcacctgagcggtgttgcccatgcagaggaggaccggtgcgatgtagttcgggcttccgaggtggttcatgaatcgtctcgtgatgccgccgaacccgatgttgaggggcatttcggatacggcaaacgcttcggcgccgtatttctcgatgattgcagcaaggcgctcggctatttcgtcaagggcctggccccattcgatctcccgccaaacggggttcgttcgcgatcctacgttctttcgcggtttcgtgatgcggtcggggtggttgcggtagtcgcgccacaggtgcgctttcgagcagatggcgggcaggtttgggtcgagcggggaaacggcgatgccttcgtcgtttcgaatggcgacggcgcatcccccgtcgcagaatacgcacgtgctgtgcctgaatcccccggggtcgatatcagtcatgagaaccttcttcccgtgccgctcgtctttcgggtatggtatctctttcggggtgtttcggatagggcttaggggcgtttctgcgcctctgatccaccgaagccttcttgcgattgcgcccgtagccggtggaaaactgtgcgaaaatgcaaaaaacttcttgaccctcctcttgggggagacggttgaatgcaatgcgaaggaggtgaagacatgttctacatagggagtttctcgaaaatgggcaagacgacggtgaagacgctgcactactacgacaagatcgggcttctgcgccctgaggcggtcgaccgcttaacggggtaccgcctctatacgacgagccaacttgtcgaattgcaccgcatacaggcgcttcgccaagcaggcctctcgatcgacgagatcgtggcggtgttcgacggcgccgaaatccacgatgttctcgaacgccggagggacgaggtcgtcagagaactccgcgagcgcgaagggcagctcgcacgcattgcattcatcttggacaacgaagacaaggagtttttcatggactatcaagtgacgatcaaagatattcccagctgcatcgtgtacacgaaggaactgaccgttcccgactacacggcgtacttcgaggtcattccggctatcggccgtgccgtcagatcggcgaaccccgatttgaaatgcgccgatcccgagtactgcttcattacgtatctcgatggcgaatacaaggaaaaggatatcagcatccaatacaacgaggccgtcacgtcatacggcaccgaggtggatgggatctactttcacgaaacgaacccggtgagcgttgcttcgatcatgcacaagggaccgtacgccgatcttccgcaggcgtatgcgttcgtgctcgattgggtggagaagaacgggtatcgaatcgtcgagagtccgcgcgaaagctacatcgacggcatctggaaccagagcgaggaagccgactggctgaccgaggtgcaggttccgatcgagaaggcgtagcgaccgagctagcgggttcgtttggaatagcccgatgagcacgtgacgggctgtgcggcgctaccgcgctcgatcggcggtagcgccgtcgtgtgtcgcgggttcgagcgattcggaccctctttgctccatcagtttccttcgctcgtggaccgcacgagatcgatgatatcctgtttcgaatgcgcgccggtttttcgatagatcgaagctatgtgtgttttgacggtgttcgtcgagatgtaaagcagctccgagatcttttgcgtgctgtagccgagcgcgagaaaatcaagcacatcgcgctcgcgatcagtgaatccgtagcgagccgagaccatctcgacggcaacgtgcgatcccggttccgtttcggttccgccccgtggatcctcgctgtctttgcttgcgaagaacagcgcgcttcccctggtgtaaaacagcaggaagagagaccagcacaccacaagcaagaatccgatggcggctatgtaggcaataaggttgctggttatttgtggatagattgccgaaagccccatctggaacagctttgagacgattgcgggcagtaggagtacgagaacgaacgtcggtgctgctcgcatgccgtttcgataaacgatcatcgcgaccgtgaagaatacgacgatcttgatgattctgcgcagcatcttggtgagatcgtaggagtacgcgccatcggaagacgaggaaaccaagaccatgaagaatacgagaaatgagaagatcacggatgctacgaggatgttgatgaagacgccgtcccaaaagcgagcgcttgaatcggagtaggccagaatggcgagaagtgcgacaatcgcgacgaaaagcagcgcaaagcaatagggattctcgtcggaaacgggaatgtagcccggcgcgatgaattcgacgtatgccatcagatggacgagaaacgagaacgaggcgagcatgagcaggcttagccgtaccggctttgcagcatgcccgctttcgacgggtggagtgctcggtctgtcgaatacgcttttgatcattgcgagcgatatgcccgagaaagcgggcgacaaaacgacgacgatttgcccatacgccgacgaccgaagcgagctgggcacgatgaggaagctgagggcgatggcgatgagcgcgacggcgagcacgttgaacaacccgtactcgaagacgagatcgtgcaatcgcatggaccacaggatgaagacgatgctgaacgacagggcgtacacgatgccgtaagcggaaatcgaagcgatcgtgccgggaaggacgcctgccgaggtggcagcgagaagcccgagcgcgcatgctccgagaatgcccgcagcgaagggagccgcctttgcggttctcaggcgtgcgagcagcttttcccgaaaggcgatgcagcaggagatgacgcataacgcgatcaaagctaccgaataggcaaagaacccatcttggttagcggagtaggaatagacggcttcgccgaagaacaccttttcaagcgccatccagatgaacgtccatccaataaggaggacgatcccgtttcttgtccgaagcatcgacaatacgtgcaacgaagctcctccctcgcgttatccccatcccgtgattatacccattcggtccaacgtatcatgcatttttctcctgcagtggactatctcgttagttttgggtgaggcgaaccaccctctgcgagcgagcagatccgtgccaaatcacctcttgcagcggaagatcgccgcgacgtttcttcatagcatgaacgtcgatcggaggttcggattcgatccggtaccgtcgagcgtacgggaaaagcgaaggaagggttgcaatggaacaggtaagcaggcgttcgtttgtcaaaggcgcagcggcgctgggattagtcggaggtttggcgggcttggcgggctgcagccaagcgcagggcgagcaaagcaaaggcggtaaagcgggggcattcgttgccggtgtttatacagcggatgttatgggccataacgccccgttcaccgttggcgtgacgttcaacgactatgcgattacgaacatcgatacgagtagcagtttggagtcgccgggcgttggcatctacgcgatggagaagatgtcggatgaaatcatatcgacccaatcgatcgatgtcgatacggtagccggcgcaacgctttccagcatggcacttcttcaggggattcaggattgcattgagcaggctggcggcgcgagtctttcagctgcacccgttgtcgccgaagccgaagaaacggagtattcgaccgacgtgtgcgttgtcggcggcgggggcgggggatgcgttgctgcgatccgggctgcccaggcgggagcgaaggtcgtcatcatggagaaatgcgatatcctcggcggatcgaccaacgtatcgggcggagcgctcaacgcggtcgatccgtatcggcaggagaagcagggcatcgaggattcggtcgagaccttctacagctcgacgcttgagggcggacacgatatcggcgatccggttctcgtcgactttcttaccgcgcatgccatggagtcggtcgagtggctcgaagagataggatgcgcattcaagctgaaagtcggttcggcaacgggctctctcggcgaacgcagccattacacggtgaaacctgcgggaagcggctataccgatgcgtttcgcgattggatcgccaacaatcccgataagatcaccgttgtttcgggagtgcaggcaaccgagcttgtcaaaggggccgacggtgccgtatcggctgtaaagggaacgcgtgctgatggcgaggaagtaaccgtggcggcgaaatcgatcgttcttgccacgggtggattcggcgcaaacgtcgagtatcgccaacaggtgaacacgggggtttgggctgaggttccgcttgacgatacgatcgggtgcaccaacatcaagccgtgcgcgcagggcgatggcctcaagctggccgaggcggtaggcgccgagctcatcggcctttccgatatccagctccatccgtgcggcacgcccggcacgggtctgatgcagcatatcaggacatcgggtcgcaataggatattcgtcaacgaggaaggagcccggttcgtcagcgagggggccgctcgcgacacgctgtgcaaggcgattttcgctcaaagcaattcgacgtactggattgtggtgaataaggtccgctatccctcccttaccgaaccggacaaagacggcgagaaaatgaaggacatgatcgcgctcggatcggttgttgccgcggatacgcttgaggagctggcagctgcgacgggcatggacgaagccaagctcaaggaatcgattgatacttacaatgccgtcgtggcaggcgaaaaggaggatccctttgggttcgaggcaacgaacagcgccgatgtccaactgactgaggggccgtggtacgcgtgcaaaaaagtgccgaccgtgcaccacaccatgggcggcatcaagatcgacgtcgattcgcgcgtgctcgacgcttcggatggccccattcagaatctgtacgctgttggcgaatgcactgggggcattcacggatcgaatcgtttgggcggaaacgcgatagccgacatcatgacgttcggtcgcaatgccggtttgcgtgctgccgaaaatgcgggggctgcttcgaagtaaacgtcgcgatgcctttggcattagagatagggccgatttcgcgagttaggcgagatcggcccttgctgactattacaaattagtgtataaataagtgacaccgaagggagctgttatgccgttgccgtccgccttgccaagcattcgtccgataagcgatcttcggaccaagctcaatgaggtcgaagccgaagcgaaagaaacccgcgagcctattgttatgacgaaaaacggcgttgcgtcgctggtcgtcatcgacagttccgcatacgaagatcgcttgcagcacgaacgggccgttcgaaagctgcgggaagcggaaatcgaggcgaagtacgtatcccaaaccattgcccatgatcaaatgaagttgcgtatcgctacgctgatcgaggcggccgagcggtgcgatgcgtgagatcgagtatcgccttcgtgcggaaatcgatatcgacggaacgataacgtatcaggcggtggtgcttggatcttcatctgccgctcgcgcaaccgccgatgccatcttttctgcaatcgagagggttgcgatgttcccggaatcgggcaagcctgtattcgatgatgcgcttgagcagggcggctatcgcaaagtgctcgccaagaggcactggatctactacacctactcggccgagacgctgacggtttggcgcgttgtccatgaaacgcaggatgtcgacgaattcggattcgatgttttcgaggatcgataggttttcccgcgctggccttctgcgcgaaactgcttttgccgacaggtcggattcggggcgcttaacctcaaccccagcatagcgctgtcgcattagcctcgacgggtttgcctgacttggacgagcacgacaccgaggcagattgcgatgtagacgattaagcggaagcacgcatctccctacctcatgagcatgcgcaaaagcttgatcttgtctccgaacgggggaacgcgcacggggagctcgagccaggtgcccttcttgagcgtcgatttgtaatgcgtgaaacaatcgaatccaactttgccgtggtaggcgcccatgcccgagttgccgaccccgccgaagcccatgtggttgttggcgagatgaatgaccacatcgttgatggtcgcgccgccgaagggcagttcgcggatcacgcgttgctggatgtctttgtcgtcggagaacacgtaggtggcaagcggcttctcgaacgtgcggataatgccgaacgcctcgtcgagcgttttgtaggtaagtacgggcagcacgggtccgaatatctcttcgcccatgaccggatcgtcgagcgttacgccccgcaggcacgtgggctcgatcttgagcgtttccgcatcgccgtgcccgccgaatgcaacggttgcgttcgggttgcggttctcgatgaggctcatgacgcgatcgaagtgatggcggtttatcatgcgcggccattcatcgcaggcgagaatgttttcgctgtaatactgatggaagcatgcgtcgagctttgccacgagctcgtcgacgacgtcttcgtgcacgaggaagtagtcgggcgctacgcaggtctggccggtgttgatgcccttgccccatgcgatacgctgcgctgctcgcttgatgttggcggttttgtcgatgatgcaagggcttttgccgccgagctcgagcacgacgggcgtaagatgcttggcggccgcctccatgatggtgtggccgacgttcgggctgccggtgaagaagatctgatcccagcgcgcttcgagcagccaatcgttcatgctgcccgatccgggaaagccgcatacgaattcaggagggaacacggaggcgagtatctcaatcagaagctggctcgttgccttagacgtgcgtgacggtttgagcgccacgcagttgccggcagcgatggcatcgaccatcggcacgagcgcaagctgaacggggtagttccagggcgagagcacgagcacgacgcccaaggggctcggatatactttcgacgtcgaatggaaatgcacgatgggcgttgcgacgcgacggggcttcgaccagctgttgaggtgcttgaggcatatgttgatctcgtcgtagaccaacccgagttcggtcgcgtagccctcgaagtgggctttgcccagatcgtcttgcagcgcattgagtattcgttcctcgtttgctttgaggtacgctttgagctgcgtgagtgcttgacgccggtgctcgacgggcaacgtcttgcccgcggtgaagaaatcgcgcattttctgtgcctgcgcctcaacgtccgcgacgctttcgaattgcggttgctgtcccatcgtctcctcctagtacgcggcgttgagaatgcccatagccacgtcgatcgtgatctcgctgtcgttatacagggccgcaccgtcgtagcgcgcctgtttggcgatcgcttcgaactgttcgggctcgacgccgaggtcgcgcagtttgatgggcacgccgtattcggtgtggaaccgttcgttcatctcatggagcttgcgggcgaacaccatgtcgcggttgtcgggctccgaggcgatgtagcacgcctcatcgaggtcgcggagcagttcgccgtacattccggcatgaaatccctgcgagatgttgtaatcgacgcaatggggcagaagcagcatcatcgcctggccgtggggaatgtgcgcgagtccgccgagcgagtgtccgatggcatgcacgatgcccaccatggcgttcgagaacgaggctcccgccatgaggctgccaagtgcgagcgacgtgcgggcgtcggcgttttttccgtcggcgcaagccgtgtacaggttatcggcgataagcgcgattgcacaacgcgcgaatgcgtcgctcacgggattcttctggatggaggtataggcctcgatcgcatgtgtgagcgcgtccattccagttgtggcggtaagcttcggcggaagcgagcttgtgagcacggggtcgagtatggcaacgtggggaaccagcttgtacgatgtgaacgagagcttgacgtgcttttcggtgtcggcgacaacggccacgagggtgacttcgctgccggtgcccgcagtggtcgggatggcgatgaagggaggcaggtcgttttggagaatctcagaaccctgcagcgttgagaagtcgacgccctgtgcggaaagcgaagccgctgcgcctttggcggtgtcgatgaccgagccgccgccgagcgcgatgaatccgtcgcagcccttttcggtatagagtgcggcgacttcgtttaccacgttcatcgacgaatcgggcggtacgctgtcgtacacctcgtagggaacacccgcagacgaaagctctttgaacaggttgtcggcaactccgagcttcacgagaccttgatcggtcatgacgagcggtttggcgattccctggccgtgcagctcgtcggcgatcttcgccagcgatcctttgccgcagacgattttagtgggacaggaatactcgaaccctttcacggttacctcctagtgggtgcttgcaacggattggtttcgataggcgcggcgccagaagaagaacgagcggaggagcgccgtgaacatataggtaagcgagacgccggtgttgttgggcccgcgtgtggtgaacgcccgttcggcgagcgcgtcttgaagcgattcgccgcccgagaagcactggaaggcgtagtcgagcgagcggaatgcgattacgtagtcgacggtgacggcatcgttgcgcgagctcggaaggccgcttcccggttcgacatcggttgcgacttcctgtttcggcacgcgccgaaacgttcccttctcggttttgcggcagatgcagcaaaggtcggcgcccatcacgtcgagcatgaacgtgtaccccgcgtcgaggtaatcgatttcggcctgaacctttcgcgacacgtagcgcatgttgttcacaaggaagggcagcatgcgaagaagcgcgcgcacgtagagctttttcatccgttcggccgtcgtcggttgcgtctgtgttgccatgatcactcaaatccccttatcggcgtctgcagtcagggcgatcggatccgatcgtcgcatggcttcgggccgcgctcttacgcggggcgcggaccgagcgtcgaaccaatgataacgggttgtttcgggtagcgcctgtccgttcatcggaaaatcaccgcgaagggcgccgtggggcgggcgaaagcgcacggtggggttttcccgccgcatgcatacgttcatcaggcgatgcaatataagctcatacaattccgaggtcaaggcctcataccggggatgtactccatctgatgtaattccatgacacgacgatgacggattggttgcgtgtgggttgagcgggaaaaagcggtggtaaggtgacgtcatcacaaatggcactgcatgtatttaccacaccagaggagagtgaaagcaatgaccaacacgaatgggaccggcgctccggttccgccgccccagggcgatagccagtactctgcaccggctcagccggcccaacctggccagccgacccaacctggccagccgactgcacatcatgcgcagcattcgcagcaggcctactaccagcagcccgcctaccaggctccttcggctcagccggcagcgccggccaagaagtcgagcggccccaagacgtttttgctcgcatttgcgggcgcggccctcgcgtgcgtcatcgcgctgtcgggcttcggcatctacaatgcgatgagcggaagcggagattcgggcgattcgggatcgtcgaccgttatcggatccaccggaaactccaacatcaacgcagctgacgacgatgcgacgcttgccgaggcggttgcccagaaggcgttgccttcggttgtcgccatcgacgtgtacaccagccagtccgctggcggcatgtacggctacggcatgggtgccgattccgattcgagttcgcttacgcagtcctcgctcggcagcggcgtcgttttgtcggaggacggctacatcatcaccaactaccatgttgtcgaaggcggcgaagcgtacaaggtgaccatcgagggcgagcagtacgatgccgaggtagtcggcaccgatccgagctccgaccttgcggtcctcaaggcgcagaacgcctcgggcctgaccccgatcgagatcggcgattcttccgacctgatcatcggcgaatgggttatgaccatcggcagccccttcggcctcgagcaatcggttgcgaccggcatcgtttcggcgaccagccgctcgcagatcatgaactcgcagaccgacggctccacgatgatctatgcgaacctcatccagaccgatgcggccatcaaccccggtaactcgggcggcgccctcgtcgacgcaaacggcaagcttatcggcatcaacacgctgatcacctcgtattcgggcaactactcgggtgtcggattcgcgattccggtcaactacgcggtgaacatcgcgcagcagatcatcgacggcaagaccccgacccatgctcagctcggcgtatccctttcgacggtgaacgagcagatcgccaagcgctacggccttgcagttaacgaaggcgcctatgtggccaacgtgagcgaaggcagcggcgctgccgaggccggcatcgaagttggcgatatcatcaccaagttcaacggcacgaccatcacttcggctgacgagctcatgcttcagatccgtgcgctgaaccccggtgacaaggcggaagtcgagatcaaccgcaacggccagactgaaacgctggaagtgacgctcggttccgatgaaagcacgcaggctgccacgcagcagcaaagccaaagcggcggttcgatcgaggacctcctgcgcaattacggcgggaacggctatggaagcgacggctacgcctcgtaggcgaaacgccctcatcggcaacctcgcagacgggtccttcgggacccgtcttttttgcgtgtcgcacgcgttggccgcgccggcgaagcgtctgttgcgaaaggtttcgcgtcgggcgctcttcctgcgggcgggcgttgcgccggtaggttttggcgctggcgcatgcgcggcgggcaggcaggcggacagcggtcgaacccgtctgctcattacgtgaaatgcgatagcgcccacctgcaaaacgcagcggatgcgtgacttttcggttactatagtcgcggcgaatacatgctcggatcgtgcgcgcggccttgcgtctgcggcgatctcggcgctttcataaacgatgcgatagaaaggtcgatgaatgtctgagggctacaagtacaagcgcgtccttctcaaactgtccggcgaggctttggcgggcgatgcggggtacggcatcgatccgaaggtcgtcgaagacctggccgtgcaaatcaaagacatcgtgaaagacggcgtcgaactggccgtagtcgttggcggcggcaacatcttccgcggcatggcggcaagcgccgagggtatggagcgcgcccaggccgattacatcggcatgctcgcgaccgtcatgaacgcgcttgctctgcaggacgccttcgagcgccacggggtctattcgcgcgtgcagagcgccatcaacatgcaggaagtatccgagccctacatccgtcgccgggcaatccgccacctcgaaaaggggcgtgtggtcatcctggctgccggcacgggcaatccgtacttcaccaccgacacgaccgcggcgctgcgcgcatgcgagatcgatgccgagtgcctgctcaaggcaaccaaggtcgacggcgtgtatgacagcgatccgcgcaccaaccccgatgccaggaaattcgacaagatcagctacctcgatgtcttgtccatgggcctcaacgtcatggattcgacggcgacttcgctgtgcatggacaacgatcttcccatgatcgtgttcgatttgacggttcccggtaacatcgccaaagctctcaaaggcgaaaacgtcggaaccacggtacaataagcaagaaagcttcgcgccgcttcgggatgcggtgccgcacacagggatcggttgaaaggaactgcagatggttgacgatattatggctcaggccgaagaacgcatgatgaaggcgatcgaatcgctcggttcgagtttcgctgcagttcgcaccgggcgcgcgaacgcgatggtgctcgaccgcatcaaggtcgattactacggcgtgcccacgccgatcaaccagatggccgcagtcaagactcccgatgcccacatgctcgtcatcgagccgtgggacaaatcgacgctcggtgcgatcgagcatgcgatccagcaatccgatctgggagtttccccctcaaacgacggtgcggtcatccgtctgccgtttccggcgctgaccgaggagcgccgccgcgagctcgtgaagcagtgcaagagctacaccgaagaggcgcgcgtggccgtccgcaacgcacgccgcgatgcgaacaccgcgatcgataaactcaagaaggattccgagatatccgaagacgatgcgaagcgcgccgaggcggaaagccagaagctcaccgacagctatgtcgcccagatcgaagatgccttcaagaagaaggaagccgaggtcatggagatctgatctccgaggcccgaggttgcagtgaacaagccccttttcgaaatattccccgatcctcctgcagggctcgatcctgcggcggtcgatgccgagcgcattcccgagcatatcgccgtcatcatggacggcaacggcaggtgggcgaagaaacgtgcgctcaatcgcctgaaggggcatgcggccggcatcgaagcggtgcgcgaaaccattcgcgcggcaaacgacatcggcgtgaaataccttaccatctattcgttttcgaccgagaactggaagcgtcccgaagaagaggtcatgggccttatggatctgttcgcgcagacgatgctcgccgaagtcgacgagcttcacgaggaacatgtgcgcgtcatgacgatcgggaggacatctgctttgccgaagaagacgcgcgacgcgttcgacgcggcatgggagaaaaccaaaggcaacagcggcatgacgctggtggtggccatcaactacggcggccgcaacgaaatcatcgacggcatcaacgcctacatgcgccaggcgcacgaggtgatcgccgcggggggaaagcccgaggccctgagcgaagacacgtttgggcggtatctgtacacatcggagatccccgatcccgatctgctcatccgcacaagcggcgagatgcgcgtctcgaacttccttctatggcagatcgcctatacggaattctactgcacggatgtgctgtggcccgatttcaaccgctacgagttcttgcgggcgctgcttgactaccagaaaaggaaccgtcggttcggagcggtgggatagatggccgttgacgatccgaacgacaatccaggcggtacgggccgtataaagaagttcgcgctcgacaaaacgcccaagaagctcaaaaacccgaccgatatacaggtgcggtttcgcaccgggttcgtctacatcgccatatcggtcgtctgcattctggtcaacgacatcaccacgatggtgctgctcgcggcgacggccggcatttcggcgggagaattctactatatgctgcgctccgacgcgaagcttcccaacgagctgctcggcataatcgccgccattctgtatcctataagcgtatttttcttcggattgaacggggctcttatcgtcagcgtggggctgctgatcgcgctgatcgcgtggtacgtgttctggacgcgcgcccgcgtgcccgatgtgggggtcagctttttcggcgcagcctatacggggttgctcctttcgggcatcatggtcgtgcgcatgtcgcttcccgacccgtggggcggcgtgctcgtgctcgccatctttttgagcgtatgggccaacgatacgtttgcctacctgatcggccgcaaattcggtaaacacaaactcgccccccgcacgagtcccaagaagagctgggagggatttttcgccggtttggtgggttcgatggtcgtctggtatgccatgacctacattcctggcgtttcgatggatgtggctcaggctctgtctttcggcttgatctgcggcctcatgggcgtgctcggcgatttggccgaaagccgcatcaagcgcaattcgggcttcaaggattcggggacgatcatgccggggcacgggggtttgctcgaccgcaccgactctctgttccttgtgtcggttacatctgcgatcctgcttttggtcgggggttgcattccgtttgtcgtctaagccctgcagggcgcgcggatgcgtgggcgcaccgcgggaaaggtgcattcgcatgtcggctaaaaagcgcatcgtcgtactgggatcgtcgggatcgattggaacccagactctcgacgtggtgcggcagcattccgataaactcgaaatcgtcggcttggcactggggacccgtatcgacgtgctcgaagctcaggtgcgcgaattcggcgtgcgccatgcagcggtgggcgacgaaagccttcgaggcaatcccgccgcgcgatccctcgccgcgcacctcgcgcttgccgacgacgcggaaacggcggctacgctcgaattcgggcaggacgcggtagtcggtctcacgggcattcccgaagcggacatcgtggtgaatgcgcttgtgggtgcggcgggccttcgtgcgagctacgagacgcttcgcgcaggcaaggtgctcgcgcttgccaacaaggaatcgcttgtggtcggcggcgatctcatcatgccgctcgctgcgcgtgtcgacgaggagcggcgtgcgagtggcgcggctcctgcgacgggacctgcaggtgcgctcatgcccatcgattcggaacatggggcgatataccaatgcctgctcggggagcgcatggaagaggtgagcaagctttgggtaacggcttcgggcggacccttccgcggacgcacgcgcgccgatctggccgatatcacgccggctcaggcgcttgcccaccccacgtggaatatgggagccaagatcagcatcgattcgtcgacgctgatgaacaagggcttggaaatcatcgaggcgcatcatctgttctgcatgccctacgacaagatcgaggtggttgtgcagccgcaaagcgccatccactccatggtcgaattctcggacggaagcgtaaaggcgcacctcggcaccaccgacatgcgtattcccatccaattcgcgctgtcgtatcccgatcgctgggatgcgccggtgaagccgatggatttccgcacgctcggttcgctcgatttcgccgcgcccgatgcagacaccttccgctgccttgcccttgcgcggattgcgggcgagacgggcgggacgctgccttgcgcgatgaacgcggccaacgaggttgcggttgcggcctttctcgccgaacgctgtgcgtacctcgatatcgccgcctgcgtcgaggccgtcatggaagcgcacgatccgcagtcggtcgaaagcctcgaacagctcgaagaaatcgatgcctgggcccgcagaaccgccgaggcgtgggttgcggcaaggtagggcttccggcggcgtcgcccgaattgcgcttcgatgccatcgcccggattgctcgtcgataccaaacggtcggaaagtgctgccgccgaaatcttcctcggcgaaaagcggtccgaaatggcggtcaaggcgagcttctgtaaagaatcggcatcaaatcgctcggtttcctgccttttttcgcagcggcgagctgcttgagaatttgcgacctgcgcaaacgccgatcgagagacgatttcgctgccgcagcgctgacggaaacttgccttgaccgccaattagagggcgttttagcataggaaagctcatacctattgctcggcatctcgatttcacgttgggctgcggcatcgtcgagcaaggcggcttttgcgatgctgcgcgaatgccgcctggcgctatactggatgcatctgtttgcttggcgagaaggggaaggtcgaatgccggttatcgaggacgaacctatcgaagacggacctattgaaggaggacgtatcgaaggcgattctatcgaagacggatcaaagcccgtcgacgcggttgctttcgatcggcgaagcgcgcgcggttccatcctttccatcggcgccgtcatggtcgacgtcgtgtgccacgttccgcggcttcccgagcggggcgagggcgtggtggtgagtcgccgcgagacggtggccggcgggtgcgcattcaattccgcgaacgtcatccgccagcttggccagccggggttcctgttcgcgccgatcggcagcggcatattctcggatttcgtgcggggggagttggcggcaagaaatctcgaggcgctcgaaatcgaaaccgagctcgattgcggttcgtgcacctgtctcgtcgaacccgacggcgagcgcaccatggttacttcgcccggcatcgagcggtgcttcgagctttcgtggttcgagggcatcgatgccggcaagttcgggaaagcccttgcgagcggatacgagatcgagggggcaggcggcgaagccatcgtttcgtttctcgaggcgcatcccgagatcgagttctactatgcacccggcccgcgcatcgaaggcgtggggcccgagaagactgcacgcatcaacgcgcttcgccccgtgtggcatctcaacgatctggaggccatggcatatacgggacgttcgtctgtcgaagaggcggcccgcgccatcgaagcgcaaagcggcaacgccgttgtgataaccgagggatcgcgaggcgcgcacctgtacgcgggcggcgagcatcttttcgtgccgaccgaaccggtcgatccggtcgacacggtgggggcgggcgatgctcacctcggggcgctcgtggctgcacgcaacgcagggctttgctggggcgattcgctcggtctggccaacaaggttgcaggcgcggtatgcatggtaccgggtggcacgatgagcgacgaggcattttcgcggttggggctcgggctgtaggagcggatctcgattggagtcgggttttgcgcggcacgtcctaacgtgcggatgatccgtgctgcgcacactgtttttgcgcacgccgcgcttcctacgatgattccgatgcgaggagcagcctgcgtaccatgcgaatgcctcgggcggctactccagcggtcgtacgaggcgtgatcgcaaaggagattcttgcggaagtttatgggattaccgtgggtcgcgccgtttgaatgtaagtctttctataataatatgctgtgaactctatcggcggtcttcgccgtttttcataaggagcagcatatggacgtcatcctgatgatcttgtacggcatcatcgtactcggattcctcgtcttcattcatgagggcgggcactaccttgcggcgcgtgcattcggcgttcgcgtcaccgaattcatgctgggtctgcccggtcccaacatcggtttcaccaaaggcggcaccaagttcggcgtgaccgccattccgcttggcggctatgcccgcatctgcggaatggagcccggtggcgaaagccctcatctcgagcgcgttctcgcctgcgtgtttcggcgcggcgttgcgaacatggaggatgttgcaaccgagctcggcatctccgacgatgatgcctacgacgcgctcgagcagctcaccgaatgggggtccatcgccgggccaacgaagaaagaccagttcaatacctatcgcgcacctgaaatcaagccgagcagacgcgagctcgaacggggagcggtcgcctacgagctggggcagcagcgcatcgttgccgatccgcgcggtttcttcgaaagcgagcgcaaacagcagtaccgcagcctcccgttttggaagcgctcggtcatcatcttggcggggccggtcgtgaacctgctcttcgccgtactgttgttcatcgttttgttctcgatcatcggattcgatgtgacgaacacgcaaaccggggagatctcgcatatgacggtaagccccctgcaggcgattcaggcgggattcacctacatcggcatggttatctcggccgtcgtcggcctcttcaacccagccacgttcggcgatacggtgtcgaattccacttctgttatgggtatcgcggtgatggcgaaggagtacgccgatctcggactcgtcatgttcggccagttcgtcgccatgatctcggtttcgctcggcatcatgaacctcattccgatccccccgctcgacggcgggcgctttgccatcgaggttttccagaagatatcgaaaaagttcgtatcgctcaaggcgctcaactacatgagcacggtcggcatgctgttgttcgtgggcttgttcctcgtgatgatcaaccaggatattcaaaggttcatattcggcaactggggttaacggtaagggggtgccaatggaatcgcaaaggcctaatgcgaaaacgcgccgcgtgatggtgggcgcagtgcccgtgggcaaaggcgcgccatgcgcggtgcagtcgatgctcaacgctgcggccgacgacgtgacggccaaccttgcccagatcgagcggttggcagaggccggttgcgaaatcgtgcgcatggccatcccgcgcaaatcatgcctcgattcgttcgaagccgtatgtgcggcatcaccgcttcccgtagtcgccgacgttcatttcgatgccgatatagccatcgaagccgcgaagcgcggggcggcgaagctgcgcatcaacccgggaaacatcggcggtctggccgaaacggacagggtgatagcggcggctcgcgaggcgcgcatccccatccgcatcggcgtgaacgcggggtccctcgattccgaattggccgcccgagccgatctcgcattgccggaaaaacttgctcgctcggctgccgattatgtaaaacacttcgaagaacagggattttacgatatagttgtctctgcgaaagcgcatgacgtcatgacgacggtggcaacgtacaggatgctttccgctgagattcccgccgtgccgctgcatatcggcgtaacggaggcgggtacgctcttccagggcatcatcaaatccgcgagcgggttgggcattttgctcgaagagggcatcggcgacacgctgcgcatttcgctcaccgacgatccggttgaggaggttcgcgcgtgctggacgctgttggcggcgctcgatttgcggaggcgatcccccgaaataatcagctgcccgacatgcggacgctgccaggttgatctcatcgcgcttgcgaaagaggtcgagggacggttgcgatcggtttcgctgccggtgaaggttgccgtaatggggtgcgtggtgaacggtcccggcgaagctgccgatgccgatatcggcgtggcgtgcggcaagggctcaggagtgatattcgcccagggaaagaccttgcgcaaggtcgacgagggcgatattgtggatgctttgatggaggagattggaagactatgacagatatcatgcgtatgagcgaactctacgttcccactttgaaggaagatcctgccgacgccgagattgcaagccatcgcctgcttgttcgcgctggtatgattcgcaaggcggcgtcgggcgtctacaccttccttccgcttggcaagagggtgctcgccaaggttgagaacatcgtacgttccgaaatggatggaatcggcgctcaggaaatcatgatgccggtgcttcagcccgcagagctgtggcacgagagcggccgatgggatgactacggccccgagctcatgcgtcttgacgatcgccatgatcgccaattctgccttggacccactcacgaggagattatcacggcgctcgttcgaaacgagcttcgctcctacaagcagcttccgctttcgctctatcagatccaggtgaaattccgcgacgagatccgcccccggttcggtctgcttcgcggtcgcgaattcatcatgaaggatgcttacagcttccatgattcgcaggaatcgctccagcagacctacgacgacatgagcgccgcctacggcaggatctgtgatcggatggatcttgactaccgtccggttgaggctgattctggccagatcggcggcagcgtgacctgcgaattcatggcgcttgccgatgcgggtgaagccgagctcgtgcattgctcctgcgggcacgctgccaacaccgaggcaggggagggccttgcccgcccgaccgagtacactgccgcagacaagctcacgaaaatcgcaacgcccggtgtgcataccatcgccgagctggccgcgcttctcgacattcccgaatcatcgacggtcaaggcgctttccggcaagggcaaagacggtgcgatcactgttttcttcgtgccaggcgatcacgatctcaacgagctcaaagcggcccgcgtggttgatggcttcgagcttttgaccgaccaggaaatggaagcggctggcctgcacaaagggtcgatgggtcccgtcggtcttcccgagggcgtgcgcgttgtcgccgccaagagcctgcaggcgatatcccgctgggtcgtcggtgcgaacgaggacggctaccactacatcggcgcggcgcccggcaccgatttcgaggttgacgaatgggccgatctcgtggtggtgaagccgggcgattgctgtccgaaatgcggtcttccgctcgaaggcgcccgtggcatcgaggtgtcgcaggtcttccagctcggcgacaagtactccaaatctatgggggcgacgttctcggccgaagacggctccgagcagccgttcctcatgggctgctacggcgtgggcgtatcccgctccatggcggccatcgtcgaacagcacaacgacgagaacggcatctactggcccgtttcggttgcccccgcgcacgtatgcgtcattcctcttaacgtgggcgatgaagaggtgcagcctgcggccgaacggcttgccgccgatatcgcccgagcgggcttcgaggtcgttatcgacgatcgcgacgagcgcgccggtgtgaagttcgccgatgccgatctgatcgggtggcccctgcagatcgttgtgggcaaacgcggtttgaaggaggacaaagtggagatcaagctgcgcaggaccggcgaaaagcgcgatatctcgatcgaggcggttgccgaagcgcttgcttttacgaagcgcaacatcaagggttcgggtatcggcgctttcggcagtctgttctcggattgatcgcggttccgatgatcaaagctatcctattcgatcttgatgggactctgctcgatacgcacgatctcattctcgaatcgatgcagcatgcggtgaagacggtgcttcgggaggatattccccccgagcgcctcatggccaaggtcggccagcccctctctgtgcagatgtgggatttcacgagcgatagggaacttcatgacgaattgctccgcgtgtatcgcgaatacaacgccgtcaagcacgatgacatggtgcgtccgttcggaggcgtcgaagaaacgctcgacgagctgcgcgccgaggggtatccgctcggcgtcgtcacttcgaagcgccatgatgcggccatgcagggactgcagctgttcgggctcgacggctatctgaactgcatgatcggatcggatgattggcccgagcacaagccgcatccgggtcccgtttcccatggcgcagagcttttgggccatgacgcgaaagaatgcctgtacgttggcgacagcccctacgatattcaggcgggcaacggcgccggatgcaagacggcggctgcgctgtggggtatgttctccgaaacggtgctgctggcggaacatcccgatttcgcgtgtgccggtatccgcgatgtgccctgtctgctgtaggtggctggtgcccggttgcaagtagtgggtggggtcccgggcgggggaatgcctatatgctgttgaagaagacgacgatcattatgcctatgagcatgaacgtcgtgcagcaaaacagggtgatcttgcattcagttgccgcaagcacgcccgtatcgggctgctgcgttctgaaacgcacgagtttgatcaccatcgcggataccgaacctataatcgccacgtagccaagtacgtggcagagagggaagagtacctccgagatatctgaaatgatgaaaccctcgaacatgggtcgctcctcgttcagtactgactctgcctggtatacaactagctacgcaaacgattaggtttaagaatttatcataaaacgataaaaatatcagtaggttttttgacttatctcgtacataatgataaacatcacaaaatggtatgacccatcatgtatacgacgaggccgtcggtgattcgccgcgggcattgcacgagagaaggggttcggatgagattcggcgatcaagcggttctgttcgatttcgaaggcatcccgatgattggcaacatgaacacaggctatgctatcggattgacgcccgagggcaaggagatctgccaacggctcatgcgcgaagatgttccgcctgcggaaatcgtcgcggtcgacgaagctctcttccagcatttgggcattggcgggttcttcggatacaagaagcaagacgacgcgctcaaatcggcgtatattcacatcacgcagcgatgcaatctgcagtgcgtcggttgctactcgctcgatgacgattgcaacgcgcttgcagacgcgccgaccgagaagatcaatcatgccatagcccagctcgcatctgcgggaatcggccagatcgtgatctcgggcggcgagccgtttctgcgcgacgatcttgccgccatcgcggcgttcgcgaaaatagaatgcggcgtaccccaggtggtcgtgctctcgaacggcgtcggcctcgccgctcatcagctcaagcgcgttgcgcccttcgtcgaccgcgtgtcgatttccttcgacggatgctcggctgattcgaaagcgtacatccggggcgagcagcgatacgccgaactcgtcggcgcagtcgaggccgtgaaggcggcgagcatccccgcccacatcatcgcgaccatccatgcgaagaacgtggacgacgtgcgcagctatctttccatggccgaacggttgggcgccactatctcgttcagtctgctgtcgtgtccgtgcaacgacggggcactcaaggagctcatccccggcgaaagggagctgaagaagctcgcgcggtcgatgctgacgctcggagaaggcggcccgttgcccgtttccgattcgccgattggagccaacctgaccgtcaagggctcgtgcggcgcggggttcagaacggtgagcgtgggggcggatggcaccgtttacccatgtcatatgctccatcggaaagaccttgcaatgggcaatctgttcaccgacacgctgcacggggtgctgacaagcgaagtcggccgcggcttccgcagtctgcgaaccgaggatttcgaagattgcgcagggtgcgaatacgagcggctgtgcggcggcggatgccgagcgcgttcgttgtacgagtatgaaagcttgaaatctcccgattcctattgcgttatgatgaaggagttcttcagcggcttcggctccatgctcaattcggctatcgcaatgcagggcagacgctaggatgcacgcgcgagcgcttcgatggtttcacggttttcgatgttcgcttttgtatccttgttgtaagggtatcgtgttgcatgcggcttcgcatatctgataccttgatattcgaacgaataaacctcggaatcacgcgcggattctgccgatgcagcgcagatgcagcaccgacgtgagcgtatatgatcgaaaaacttcggatagaacacggtaggcgggctaggtagacatgccaatcattctcaggcttgatcgcattatggcggatcggaagatatctctcaacgagctctccgataaagtcggcatatcgaacgtcaacatgtcacgtattaaaacggggaaaatcaaagcgatccgtttctcaacgctcgagatgatctgcaagacactcgaatgccagccgggagacatcctggaatacgttccgaacggcaaaggcatcaccgtgtcggaagacgcggatccgttgttggaaaataccgaatagcttgcagaatccgcgtacatcccggcttgcgtcggcgtttcgctgcggctctatgcgaagatgcccgcccagtttcccttctcgaatacagaaacaacctcgccgtcggccttaatcccctcgatctgaagatcctcggtgcctatcatgaaatccacgtgcgtcgcgctcttgttgacgcccgcttcgagcagcgcctctgaatccatttcggtgccgccctcgtagcaatccggaaagccctgaccgagtgcaaggtggcacgatgcgttctcgtcgtagagcgtgttgaagaacaggatgccggtttctcgtatgggcgatgcgaaggggacaagcgcgacttcgccgaggcggcgtgcgttctcgtcggtctcgatgatggatttaagggtttcgtatccttgctcggccgagaagtcgataacggcgccgttctcgaacgtgatgctgaacccgtcgatgagcgtgccgttgtggatgagggggagcgccgacaccacagtgccgtcggcacgcaggcgatcgggcgtggtgaagatctcctcggtggggatgttggggaaaaacggcgttttgtcgacggtgatatcgcctcccccgttccaaaggtgctttttcgtaagcccgaccgtgaaatcggttcctgctgcgtttgcgtagtgcagcgcatcgaatcgctggtcgttcaaaagtctggtgcgggcggcgaagcttgcgcggtgctcctcccacgcggcaagggggttttccgcgtagacgcgcgttgtcgtgaagatcgcgtcccacagcttgtcgacggcttcgcaatcggtcatgccgggaaacaccttgcgcgcccatgcgggtgcggctgcgccggctatgcaccagacgttgcggccgaagtcgagcgcgtcgtagaattcgcggcatgcggcatgcgcggcacgtgcgttggcgacggccttcgccggatctatccccgtcatcgcctcggggtcgtcggatatgatcgagagaatggctgctccctcgcgcaccatcgagttgttcaacagcgccgcccattcgggcatggtctcgaatacttcgagtgcgcagttatcgtagtgcaagcgcgagattttctcatcggtgtacttgacggtaacgtgccgggcgccgcgctcgtatgcgatgcgggtgacgagtcgggcgaaatcggccgtttcgactgatgaggacaagaagagctcttggccgggctgcaggttgcatccggcatcgatgatgaggcgggcgtatttttcgaggttggtttgaagttcggggttgctcatgggttgcgctgcctttcgttggtgcgggtattcagagcggtgccgccttctcgcggcatccgattcgggtttcagttacgaggcgggcttgggggatatgcgtatgtcgatgacttgtcgacgtttgcccaatcgggcgcgcgcagggcgacaaggtgccccatcgcacggtaggtgacgaggccggctgcggcggccacaacggcgactgcatagccgatgacggcgccgaagccgattgtccccataagtccaatcgctatcaacagggcatcggttgtgctgtgagaacctgcttcggcagcgaaaacaaggagtacggctgcgaatgcgaagatgaggacgggcagcacgcaaagggctgctgcaatgaggctcggcagccagtacgaggccagggcggcgcctgcgttgcttcggaacgtccgccagatttcgggaagatcgaacgcggctcccatttggtttctcactgcgacgcgcgtgatggcgagcgccatgaacgggctcacgacgacgaatgccaaagaggatatccagccgatgacgggcatccaggcgatggctcccatgacgatggcgacaacgagggagattgcgaaagcgtagaaaccgagcgtgaaggagccttttgcgaacgtgcttttaagaagcgggttacgcaagccgcgggcggcatcgtttgcccagagcatcatgtatccgagcgcgaagaagttgacgatggggacgatcatgacgaggccgagcagcgcaatgcgcgcaaaccagcctggggatctgcggaggtcttcccatgccatcttgacggctgaagttgcggggagcggcggttgatagggctggccggcgtaattcgccggaacgtaggcattcggggtctgtccgggcgattgccagggctgtccgtttgggggctggtcgtattgttgccgataggcctgttgcgccggctggtatgcgggagccggcggttgcggcgcttgccggccggtggcttgaggggcggactgcgacgatacctgcggtggcggtggctgcgggattgattgcggaggccggcttgacgctgtggttcccgccgcatcgggctgtttgctccggtctggttttgcggtaccgttcgaatcgggttggtcgctgtggggctgatcgcttggcatggctgatcccttcggaataggttcgagcgggcatcgtaaaagcatagcatggacgctcggtttccgattcgaccgatgggcgattcgacgcaagctctatcggagggcgccccccttggcttggcgaagtgcgcaggatcggagtgccgcctccgccgcgatgccgggcgttcgacgttgggcatcgaactgtcgattggcggagtgctgtcgatcggcgtcgaaagaaggcccaaggcttacgcttgccgcatatcgttgcggtgcttatcgccatgggccagatcaatgtgacgtggtgacgctgttgcgtcgcgtctccattaagctaagccactaaaccgcctgtgtcaatcaaaccatgttgaaaaaatcttacattttcggtagaaaactacaactttttggtactgtagtacagctcctcggcattactcgtcatattgttgccctgtgatgcgcggggctttcctgcttactgcttttcgagcttcacggtcgtcgtggtgcccatcgcggaagcctcgtagctcagcacgccgttttcgtaggagaactccttcgtctcgtcgcccgaggcaagaagggccttcccggtctgctcggtgtcgttcgcggaagaccacgagtagctgtcggtagcctcggcgggcgcaacgtaggttcccgcccagtagagcgatttcgtgtcgcctccgtcgcttacccagttgatcgtgatcgagtcaccgtcgatgaccgcttcgtgccacgtatcctcagagttgggattcgactgcttccacgtaccggtcagatcgagcggctgtttctgctctccggatccctgcgagttttgattctgctgcccggagtcccctccgctgcatccgaacaggcacagcgataacgctgctcccatcagaacgattgctagctttctcatgattttcctttcgtccctccaaaaccgttttgtatttaaacggcacaatcgcccactcggtcatgccggacgtctgtcggtttattagatctcttttattggctggaaccatatgaccttgccgccgagctcgacgattttgctcatgatgccaatcctgttcttcgttttattccaaccgcagccgcacttgccgataaacgttaaatgcaaggatataatgataacaaatatggtaatagaaaccacaaacaaggaattcacgcagcttgaaaatcagtcgttgtctgttgtttcgcctgtatccaagttgattaaacacatctcaatatcgctgttgaaagcaggtccaaggtattcggcgttcaataatttcggcattgtttgctgcattgcaagaaatacttcgagctttggcgggaagcctccactttctatattgtaaaatgtacgctcggaaatttttaggcaggtctctcttcgatggcgtttgccagatcgagtccgcgagtgtagccgtatgacttacgcgcaatctttatgagtcttcccagctctacccagtctacgattgattgtctcatttcgacttctcctatgcaggcgatggcggttattgtatacgctttgacgctgagggagatgctcggatcgcgaaaacgaagtgttcgcatcttcttgcatgatccttcgagcgacggtcgggcgtctaacgagatttttcatctgcggccgagaaggaggatcggttgctttgggttgcgaatgctcttagagggttgggcgaagacgagcgcgctcttatttcaaataagggttcggatgcaaacgctgccaatgatgcatggctctatgtgttcgcgcttcttatcaaaagccagaagtgaaagcgttcaagcgttgggtaacccacgaagtcctgttgtctatccgtaagcacggagtgtgcgctatgcttgaaaccgccgaaaagctcatgggcgccacggatttttgcggcgttccgtctggcgattccgtctgatttctggctgttttccatatcccccaaatatcctaagttgtcgttttatctggatttgtcggcatatctgttgatataactgcagttcataggcttgtcggctttaaaattgcttaaagagcgcaaccaatagtttcctaaaattccaactggaattggtcgaatcgggtaagccgcaaccgtaagcttggataaggtaagatgaatgaataccgaagaaagggtcgatgatgaacgtagagatcgcggagcgcctcgcagcacggcgtaaggaagcggggctttcccaagaaggcttggcgcaaaagctcggggtttcccggcaagcggtttcgaaatgggagcgatccgagtcttctcccgataccgataaccttattgccctcgcgaagctgtacggggtttcgctcgacgaccttctgtacgtagacgggagcatcgaggaagatgtcgagttcgagcaggcggaccgtgcggcagagcgcgccgttgcgggcgctgcggactttgaggggttctcgagcgctgccggtgccggcatgccaacgggcgccgctgggttttcgggcgcaacggagccgacgggcgcagccgatcccgcggctggcgcttcgggagccgccgcttcggccgaagacgctgcgccgaccgacggcgaaagccgggcgcgggccgggtggacgagcaagggcgctccggaaaaggtgcacgtcggattcgacggcatccatgtgctcgacggcgatgactacgtgcatgtatcgtggcgcgacggtgtccatgtgaaggactccaaggacggcgacgaggttcatgtgggctggggcggcgtacatgtgacggaagggcagaatcgcgggcgcaagagcggttgtgaaagccggacgggttcgaacgggcggcacggcgaggattggtgcgctgcaggcgatgacgagggcaacaccgttgcatggacgggcgatggagtcgtcatcaacggcgagcatttcgatgattggcgcgacgcgcaggaaaagtacggacatggcggacacggcggccactggggcaggccgagcggatacacggtcaagggcgaatacttcgagacgcttgaagaggcgcgcgctcgctacggaagcgaagtggggaagagcatccccgtgcgcaagcattatcgcgtgcgtgcctggatgaagttcccctttccgctcgtcgtcatcatcgcctacctgcttatcgggttcacggcgaacgagtggggaacgggcttgttcgtgtttttcaccatacccgtttactacatgatcgggcatacgatcgaatcgaagaagattgcgcactttgtcggtggcgtctatccgattgcggtggtggcgtggttcctctggatggcgttcgtactcaatgcgccgcatccggcttgggtcgcgtttctgaccatccccatagtcgagtgggcggtgcattcgctatcccgctggtggcgccgccgcaagaaatcggatgcggtcatcgatgtagaggcgcagtagggcgcgggtttttcgtttgcatcgcagcgtgatgaaggccgcatcgagggatgcggccttctcgttctggggtcgtgaccccacccggcgcgcgcagcgcggcgggaagaaaaccacccgctatgcgggtgcgcgtcgaaggcttcgcccttgcggggcggcggccgccagctagggttatgatgcatttgttcaggacgcatcggccttagaaaggcggccaccatggcaaatcaggctaacagcctgtcgcacacgaagtggatgtgcaagtaccacatcgtgttcacatcgaagtataggcgcaaaatcatctacaaccaatacagggattcgttgggcgagatattccagcaactctgcaagtacaagggagttgagataatcgaagggcatctgatgccggatcacgtccacatgctggttagcataccgcccaagctgagcgtgtcgagcttcatggggcgcctcaagggcaagagcgcgctgatgatgttcgacaaacacgccaacctgaagtacaagttcggcaaccgccacttctggtccgaaggctactacgtgacgaccgtcgggttgaacgaggccacgatcgccaagtacatcagggagcaggaagcccacgacatcgcgctggacaagctcagcgtcaaggagtacgaggaccccttcaagaacaagtagggtcgcggaacccctttcaggggtagccgggtaatacgaaagccgcttcaagcggcggcgacgagtcaaaggcggtgcgccctgaacgaagagaagggcagcgccttgagacgctgcccggcaccccttggccttataggccctgagcaaaccacccttttgaagggtggttcatgattcgggaggcgtgcggcagggtggtgattattcggccattcccgcaatgcgtccgaagatcatgacgtcggctacggagttgcctcccatgcggttcgtgcccatgacgccgcccgtgcattcgcctgcggcgtacaggccgggaatgatcgcgccgcttgcgtcgaggacgtgcgcttgcgggtcgatttcgattccaccgttggtgtagtggatggcgatggtcaacttcgaagagtagaacggaccttcctcgatcttcgacctgcggccgatggtttccagatgaaacgccgtatcctccccggcttctaccatggcgttgtactcgttcacggtggcgacgaggccgtcggggtctatctcgagcatggcggccaattcttccagcgtatcggctttgtacgccttcccgcgttcgatgcattcgccgatggttacgccgaagccagtgaccgtgtccatcgtgggccaatccctagagtcgctgatcgtgaacatcagctggtcggtttgctgggaaagcccagcgaccgagtcgtcgcgcggcatctcctcgttcatgaagcgcttgccctccttgtttacgaagatgctgtttgcgctttcgatatcccagtcgacttgacccgaagcggggtcggcgaagtggacggcctggatggaatccatattgatgaggttcgcccccgccgcctcggcgatggcgaagcactcgccggttgcgttgacgggattggttgagaggttgacgttctcgtagcggggatcgagttccttgaccatttccaggttgtgcccgaggccgccggtggcgaggataacgcctttcgacgcgttgaccgtaaggattccgccgccgtctttctccgccactatgcccgccgcgcggccgtctgccatcgagatctctgtgagcgaggcattgaggaagcagggcacggcgaactcttcgactttctttacgagcgggtagatgaagcccagtccgttgggatcttcgggcatgtgaccccaggcgccttgcaggtctttgtagaatacgacgccgatctcgtcgacgagccattgcgttgtaggccacgattgttcggcgaaggcttggatgagatccatcttgcctgcttcgttgccgccctcccaggtccaatcgatgaagtcctgcacggtgttcgtttcgtactcggtgcctttcgttcggatggggtcccacgcgttcatgagcgcgccgcatacgagcgtgttgcctccgagacgcggcattttctcgacgattacgacctgtttgccgttttgggcaagcgtaaccgcagcgctcagcccggcgccgccgctgccgaccacgacgaactcggtttcaacggtctcgtcttcggcatccttcttgcgctcgaccttttcgttgtaatccttcgtgtcggcccctgcgttttcgagagcgtttttgacggcgttctttatggccgtcgaggtcatggtcgctcccgtcacgttgtcgacctcgaagctctggttcgcgaccatctcttgcggcatgagccgaaacgacagatccgtcaagccgggcgtctcgttgttgcgatgcggccgcacgtcgacgatgcgcccctcgtcgagcgtaacttccatacgcaggtcgccgcccatcccctcggcggttcccacgtacgttccgctgatcgagtttttaggcgctgctttctcgggtgcgtttcccgatccgttcggtgcgcatgcgacgagcgatccgcctgccagcgcggcgaaaccggcgaacgctgcgcctttcagaaacgatttacgggtgagggtgtattctttttcttccatgtgcgtccctttctctccttgatttgaaggcgagccgattctgagggttgcactaagtgacaggtcaagcgatttgttgaagttttttattcgggtacccgcaccgcatggatgatctctttcacctcatcatagaagttcacttcgtctgcaatgagatatcccagatcgaggggcttgttttcaagatagcgagacaggcttgccatatgctcttcggggcaaaagccgtggtagagaaaattcgcgtacgctccttcgggcagatggatgatctcgtctgattcgtcgaaataggcatcgaggaccacgtactgcttgacgatttcgatgtgccccttgcgtgcggcttccgcatttagcaagaatccgtagtgctcggtcaggtggtcttggtacttcgtgcgcgttttgcgcatgcggatgctcgtctgctcgaagggcaggtcgggattatggtcgattgcataggcgcatcgcaggggcagggtctccgcgaacggttctccgtctatgcggttgcgcttgaggacatccatgttaagctgcatgcgttcgatgtcggctatgcatcgatcgagtcgttcgcgctcccgaacgttttgctcgaggaggtgcgatagggcgttttcggtttcgctgtaatcacccgactcgatttggcttttcgtgatgaagatcgagcggtactccggaacgggaaggccgagccatttggcgtatttgaacatttcgagctggtagaactggtttatggtgtagtaccgatagaggttgtcggggtcgcggtaatacggcgcgagcaacccgatgcggtcgtagtagcgcagggactgctcgctgattcccaggatacgggacgtttcttttaccgagtacttcgtctcgtcgtcgtagagcggcatggcctatccctcccgtgttcgttctttccctgccgattcgaggctgttttccttgctttgccgcgcgcatgccagcacgcatgccgcaacgatcaacgcgcagccgaccgcagattcggcgcttatcgattcgctgaggagcaaagctcccgcagcgaacgtgatgacgacttcggcgttgctgagtatgcttgccttgaccgggccgaggatctgtgttgcctcaatataggcggcaaggccgaaaacggtagagaacagggcgatgagcagtgcatatgccagtgcgccagccgagatcgcgaaaggcgcgcttccgttggcaaaccataatcctcccgcgacgacgcatgatgttacgcagatgtagaacgtaagcgcgaacggatcgatcgattccatcttgtccgtgtcgagtttgagcgagtacagcgcaaacaatacggcggcaagaaggatgagcgctacgctttcggctcggacggcggcgctgccgatgttcgccaatagcgtgaacccgacaagggctatcgcgagcgtaagccaggtccgaagggttgctctgcttttacccagcataaccgacaggacggcgatgatgacggggtacaggtggtacagggcgttggcgatgcccgagtcgagatcctggcacgcgtagaaatacgagatcatcatcgctgcgtacaggcagcatgttgtaagcgtcggcactcggctgccgcgaggtacgacaggcgggcgtcttttgagaacgaaccaaacgaggagtacgatcgtggcgaaaaccgtgcgcagcacgataagagctaggggatccatgcccgtttcgtaggcgagcttggcccaaaccggcatcatcccgaagcagacggcagcggcgaaaatgcagaacagcccctttgcggtcatgtctatcctcccttgtcgtgggtattatagcgttgttggctgaagagcgctcgaaatcgggatcgtcgcaggatctcagtgcgatcgccttatgctttacatttgcgtctatcgagattcggcgttcctatcgaatcactgcccgaccccaatgtactaatcctttatgacaaaggtggtacaatgggtgagacaggacagggaaggctttgcgggtgctgctaggggatttcttggttttcagctcgtacatcgtgtggtatctctttttggcgggtgtcgcgagcggcgccttcctcgttgcctcgatctgctgcgccgtcgatgccgtaaggcggacccgatcttgcgaagagcttgcgggcagtgcgcagagcgggtttctgatcgctcccgttacggtggcgctcgctgcgctttttctggtgctcgacctgggatctcccgagcgggcttggcttgtgctcttggctccgttcgagtcgatcgtcgcaaccggggcttggctcgtgatgttgtttttcatcgtttcgtgcgccgcggcgctgtgcggcttgttcatgcgcgaagtcccgcaatggctgctctggacgtcgtggattgtcgggggttttctggcgatcggggtcatgacgtacacgggtctgcttctttccgatttggtggcgatcgatttctggtacacatggcttctgcccgtgctgttcgtcgtttcgtcgattgcgacggggctggcggcgattctcgtcgtcgatgcgctgatggcgaagcacgtgcagaagacggcgcgttcgctttgggctgtgggagcggtgctcgggattttcgagtgcatcgtagttgcggcgtttctggtgggtcgcttcctgttcagcgaggcggcgcgcgcgtcgtgtgaaatgctgctgttcggcgatctggccgcgttcttctgggttggggtcgttgcgtgcggattgatcgggcccttgctcgtccacatcttggcaacgaaggtacggggcacggctttgatcctcgtctcgtctgccggcgtgttggcgggcgggtttttcgttcgctactgcattgtgaacgctgcgttgttcaccccgatgaccctcggtggttttgcgtgattgtcatacttttatatggcaattgccgcggcctcctgtatcatgatgaagacattttcgaaggcagtttgtagggtattttggacaaggcgaatcagacaatacagatcactatcgacgccgacagcggcattcccatctggctgcagctgcgcaacaggctggtgtacctcatcagttcggggggcttcgcgcctggcgataagcttccgacggtgcgggagctagcggtcagcctgggaatcaactacaacacggtcagcaaggtgtatcaggacatcgagcgggacggctacatcgcgtcgtttcgcgggcgaggtacgttcgtatccgacgcgtatctcaaaaacgagggttcggcggaaaacgaagccgattcccttatcgacgactttatccgccaatgccgcgagctcggcattcctcggcaagagatatccgctcttgtcgaacggcgtcttaagcttactgagtaatcgggggtgcgagtatgaaatttaactttcgaagcgggaagaaaaaggacgtatccgacgtcaaggccgacaaccgcaggacggtcgcggctaccgagctcgagccgaacgaggccacccgtgcgggggtgtacgttttcgcgatcgtgatgttcgcgatcggattcggcgtggtgttcattgcgacgttcgcgtggttgtcggttgttacggtggttgtcgcggtggcggttgggttgcttctcgcatcgtgcgttcgtattgcgccgcagtgggagcgcgtgacggtgcttcggctgggcagattcaaccgcgtggcgggacctggggtattcttcctcatccccttcgtggaatacgcggccatccatgtcgaccaccgcgtgatgacctcgtcgttctctgcggaggcagcgcttaccgctgatctggttcccgtcgacgtcgacgccatcttgttctggatggtatgggatgcggagaaggcctgcttggaagtcgagaactatccgaaggccgtgctctggtcggcccagaccgccatgcgcgatgcgatcgggcaggtaaatcttgccgatctttcgatgcgccgcaagcagatcgatcgcgagttgcaagaagtcatgggcgctaagtgcgagcagtgggggatcaccgtcatgtcggtggagatccgcgatatcgtgataccgctcgagcttcagaatgcgctttcgaaagaggcgcaagccgaacgcgagcgcaacgcccgcgtgatcctcgccgaagtcgagaaggacatttccgagatgttcgtagaggccgcagatgtatacgacaagaatcccaaagcgatgaaactgcgtgctatgaaccttgcgtacgaaagcgccaaggacggaaacggcatggtgctcgcgccgagctctcttgccgacgggttcgatgtgagcaagatattaggcggcgactagcggctaggcatcgaaccgcttgcgagagggcatggcccgttgagcgatcacgggatgcgtgatgcggcgtattgaactatatgacaagagatcaaaacggtgggagaaatgctgaatcaagcgatttctcccaccgttttttgtggtgcaaccagtaaacaacctgataaggcggcattgcatggcagctcttgattatctttaaattagaatagttaaattgctatattgaactattacaatatgttaatatgacaaaagaagattaggccggtctttgaatgtgtggatgggatacggcgcgcggttttgccaagcgaaatagtattatattacttactatatgacacttcgcaccggattccgacgtagcgtttaggaggagaaatgacagaagagaaaagcctgcgcggcgggctgactcgaagaggtttcctcaagacggcgggcgttgtgacgggcgctttgggcctagcgggcgctgccggtatggcaactgccgaaagctggttggcgccttcgagggcgaacgccgctgaaccagtagaagaaaaaacgggctacaccttccattatcgccactgccagtgcaactgtcatttgaagtgcacggtacgcgatgggcgactcgcgcttatcgagcccaacgattggccggataagagaaacgaaaccgtttgccttaaaggcatttctgaaattcagcatacgtacagcgtcgatcgacttcaggtcccgctgaagcgcgtaggcgaacgggggtcaggcgaattcgttgagatcacctgggatgaagcgcttgataccatcgccgaaaaagttaaggaaacctgggatacgcatggatcccaggctatcgcgtttcagacggcggtcgattcactgaccacatctcttcccaagcttctgagggggcaggaaaagcctcgccgcggaatcgatatcggtttgggaaacgggttttcgccggcattggccgagtctggccagcagggagcgtcatcgaacgaggtaaccgattggaaaaacgccaaaaccattttgaacgtcgggtgcaatatgctggaaacctgcatggtgacggcgaagtacttcttcgaagccaaaagaggcgggtgccgagataatcacgctcgaccctaatttctgcgttaccgcagccaaaagctcgcggtggatacccatggttgcgggtaccgatcctgcgctttacttggggatgatatcgatcattctggataacgagtggtataacgcgccgtatctcaaggagaatacgagcatgccgtttttggtcaaccgtgctgatggatcgcttttgagaagggatcctgctgccagcatcgagcaggcgggaagcgagaatccgttcttggtatgggacgagaacaccaattcggtagcagaatacaatgcggaaggcgtggttcccgcactcgacttcgagacgaccatcgatggcgaagcgtacgcgaccgttttcaagctgctgaaagagaaccaaaagcagtatacggcttcatgggctgctgaaaccacgaacatcgacgaagaggtgctcttcgaaatcaccgacaagtatgcgaatcatggtccttcgattctgtcgttcggattcggtggcggcgaaaaattctacaatgcggatgtggcaggtcatgctgctgtcctgctcgctacgttggtgggatcgttcggaaccgatatccccggatggggtgcgggcgcctatgtgaacgcttatcagaaaatatttggagcaggaaagcttgcgagctggcctttgccggaagaatgcacgattgcgaaagcggccaaagacagcgtcgattatcgcgatgaagaaagcggcatcaagttcatgtgggtgcaaaacggcgccttccagcagatcgccggcaatcagaaccgtaccgatgaatgggccaaaacgctcgatttcgtcgtcgtccaagatatatggcacacgccatcggtggactgggccgacatcgttcttcccgtatgttcccacttcgagctggacgaagaggtcggtttcgtgcgtgcgttgcgagggcacgtgctgctccagcaaaaagttctggaacccctctttgagagcaaaacggacttttggatcgaatgcgaaatggcaaagcgcttaggttttggagacgtaatgcctgaaagccaagaggagcttgcccggtatcagctcgacaagtcaaccgacaaggcgcttgccggaatcactctggatgaactcatcgcgaacaacggagtcgtggcgcttaaaaatcaaccggagattgcgcgaagctacagcaaccaaacgtataaaaccacgtcggggaagatcgatgtgtattacgagaacctggtcagctacgatcaggctctgcctcggtacgaagctcctaacgaggcctatgcggataatccgctgcgcgagacatatccgctccatatgacgcaacgccgatcgaagtacttcatccaccagaactttatggacgctacgtggatgcgccagtactacaaaccgacaatcgagatgaatccagccgatcttgctactcgcggactctcctcgggagatatggtcgaggcattcaacgatcgcggctcctttagttgcgaatgcgttgccactgaggcggttcgtccgggtatggccgttatcgtagagggcatttggggaaagtacatgaacttcggaaatcttcaaaacgttacaaacgatgccgtaaacccccgagggaaagcacttgtcaaaggaagggttataccgttcaatgacacgcttatcgaagtgaagaaagcgtaggtagggttatgacgagatatgggatagccatcaatctggatcgttgcacggggtgcaatacctgcgcggtggcatgcaagatgcaaaacaacgtgcctatgggcatgatgtgggttcgcgtcgtcaacgaaggctgcgatgcggaagttggagctcagggcacgtatccgaacctcacgcgcgtgaccattcccatcgcctgccagcactgcgagaacccggcctgcctgaaggtgtgcccgacgggcgccacctacaaggacgagatggggcgcgtggagatagactacgacaagtgcatcggctgccgcatgtgcatggccgcctgcccctacaacgcccgcgtgttcaactgggaggagcccaggcgcgaccccgacttcaactacggggacaaagacgtgccggtgcgccctaagggcgtggccgagaagtgcacgatgtgcaaggagcgcaccgaccgcggcgaggagcccatgtgcgtgcgctgctgtctttcgaaagctcgcgtgttcggcgatctcgatgatcccgacagcgagatctcgcgcattcttcgtgagaggcgctcgacgcgcttgctcgaagaaaagggcaccgagccgcaaatctactactacgagtaaggggtgaggaacaatgaaaacatcaaacgcgtttaaggtttctgccgttgtgctggctgcccttaccattgcgggcgtcgccgcctggatctaccagctcatgaacggcctcggcgtgacgggcatgagcaacggcacgtcgtggggcctctacatcacctgcttcatgttcttcgtggggctctcggcggggggcctcatcgtggcctcgtccgcgagcgtgttccatgtgaaggagtacaagaaggtggcgcttccggccgtcatcctctccacggtgtgcatctgcgtggcgggcatgttcgtcctcatcgacctgggcggcatccagagggtgtggcggatcgtcgtctccccgaacccggcctcgccgctgttctgggacatctgcgtgatctcgctgtacctggccatcaacgtcgtgtacctcgcgttcatgacctcgaggaagcccggcgcccaggaccgcgtggcggtggtctcccgcttcgcgctgcccgtcgccatcctcgtgcacagcgtgacggcctggatcttcgggctcgagatggccaaggagggctggtactcggccatcatggcgcctattttcgtggcatccgctttggattcgggccttgcgttgctcattctcgcgctcgcgggattgaagaaggcgggcgtgttcgaggtagacaagaagctcatcgcgaaccttgccggattgctggctacctgcattgcgatcgatgcgttcctcatcggctgcgaactgcttacggttgcgtatccgcaggctgcgggtggcatggctctgctcggcgaaatgttcaccggctcgacggctctgttcttctggggcgagatcatcattgggctgctcatcccgttcgcgatcctcgtgtttgcgaagaatcgccagaagacggggcttgttctgggatcttccgtctgcgtcgtcgtcggcgtgttcttcaagcgcgtgtggcttttgttcacgtcgttcattcacccgaacgtgtacggtgctccggggattccctcggggtcgagcggcgcggcgcatgctgcgggcaccgatatctgggcccttacaggtgcgtatgcgcccacgtgggtcgagatcgtcgtggtcatcggggccgtgtcgctgggtgtgttggcgttcatgctgctttcgaagaagctacttggctcttctcggcaacccgatgaagacgccggcgctaaagatgtcgttgcttcggcttcggctgcatagcgattgcggaaaccgaaggaggattcgatgagcgtgatggatagcagcttgtggcaggtactcggcgaggtgtacggcttcatagggaattcgctgctgaaacccatgagccagacgccgacggtcggcttggatcctgaattctgggatgggtttccgcgcctgttcgacaacgaacgcgtcgatgctgcgctaacgaagctcaaggcgtacgccgagactgccgccgatatggatgaggcgaaggctgtcgagcgagttgcggtcgagtacacacgcctgttcatcgggcctccttcgccagcggctcccccgtgggagacgatgagccgcgcggacggcgtgtcggtcggattcggcgaggcgactttccagatgaaggccatcttgcgcgaggcgggcttggagctctctaacgagaacaaccagtacgaggaccatatgggaatcgagcttttgtatctctcggagatgtgcagaaggatcgctgcgggggagccgagcgttcccgacgcgggcgagctgagggtgttcgtcgaggagcatccgctctcgtggatcgaaacgctgcgcggtcgcgtggagttcgagcgggctgacgggtactatgccggcttgctcgagcttgcgcagggcgtgctcgaatggcacgaagggcgactcgccgagcaatagagtttccgcaagcgggaggggtgggctgcgttgattcgcggcccgctttcgtttgccctggtcttttccgtgcggcgacgatgcgccgcacggaaaagaccagggccaggtgcagaaatttgcggtttgggcgctgagtcgctgtttgctggcgggcttttggcctgctttgcgctaggcgaacggtgcggcgttcgcgctacctcgctgatctggtgtcacggacaactcgttggggaaggagtcgagcggatgtttctttccgggcgcctaaaccgcaaaaatctgtacccaggtggtctttcttgcgcgcggtctgtctcgtgagaaaaaccccgagttgggtgcagaaatttgcggttttgtacgcttagatttccgtgtccagtggcaatgcttatcgtaccgcaatgcggtgatcctgcgacctggcacctttatgatcttaccgatagtcgcctttcttcgggcgggaatcgtggcgctcggggatgctcgcaggaacgcaaaaccgcaaatatctgcactcaggtgccccttttctgcacgagcgcctggtcggcttcttttctggagcacagtcccgtatcggatgtcatacgaaaagcgggccgcccaagagagcggcccgctgcttgtcgtgcggttacggcgggcgctatcgcctgccgccgcggcggcctcttccggggcgcatgtcgcgcgaaaacgacgacgcgctgcgctggttcgatttcgggacgtactggctggcgagagctttttccgcatcggagttgtcgtagttgtcgatcttgatcgacgggattttcttgccgaggagcttctcgatgtcgcgaagtgcggttttcgactcgggactcacgaacgaaatggcgaatccttgttcgcccgcgcgcccggtgcgtccgatgcggtgcacgtaatcctcgggacaatcgggcaggtcgtagttgatcacgtggtcgacgttcgacacgtcgatgccgcgggcgagcacgtcggtcgctacgaggatgtcgaccttgcctttggtgaaggcgtcaagcgcgcgcttgcgctgggcctgtgacttgtcggagtggatggagtccacgcgatagcccgcctcgcgcaactgccgcgcgcagatttcagagcggttcttggtgcgtgcgaacacgatgatgcgctcgctgcccttgttctcgagcacggcgcgcagaagagcgggctttttcgcctgggtgatcggcatgacgaactgatcgaccgtatcggcggtttctcccttatgcgcgatctcgacgaatgcgggatctttgaggatgggcgagatgttctgcatgactttgcgatcgagcgttgccgagaacaaaagcgtctggcgcgttgcgggcgtggcggccacgaccttcttcatggtcggccaaaatcccatgtcgagcatgcggtcggcttcgtcgagcaccagcacttcgatgccgtcgagtttgacgagcccgcgctccatgaggtcgtggagcctgcccggcgtggcgatgaggatgtcgacgccgcgcttgagctttgcgatctgcgctttgtagggcattcctccaacgacggtgagcacgcggtgattcgagcttttggcgagcgtgtagcatgcggcgtcgatctgcatggcgagttccctcgtgggcgttacgatgagagccttcggcgagccggggcgcttggagcgcccgatgcgctcgatcatgggcagcgagaacgctgcggttttacccgtgccggttttggcggcggccacgacgtcgcggccttcgagggcgagcggtatcgcctgttcctgcacgggggtgggtacggaaaagcccatccgctcgacggcggacagggttgcctcggataggccgagggcttcaaatgttgcgttcaaatggttctccaaaatacataagggccacgcgccgcagcgcgtgcttgcgttcggcgagatgaggttgaatgcgtcatggttgccgagtggccgcaccgcagtgcgtgccgagcttcacatgagccgcgtgaatctgcatagatgagaatgcgaggaaaaacgaatttcgtgttaagccatcttccagtatggtcgagcgcgggctcttttcggctggcgtcggcaaaagaaagctaagttgtgggggaaacaccacaatggcgtagatgaggttcggggcttgctggattgccccgccgcctgcttgcttcttgcgggtactcgacacagcccgtttttgcgtgcttaggcgtactgcgcgttgcgcgcgccgtgggcgcaacgcgggccctttcgtcaatctccgagcttttcggaaagatctatccagagctcttcgagttcgttgatctgctcttggatcgtctgtatctccgcctgtttgtcgccgagcgcgatgaaatcggtcgggtcgatgtcgtgcatggcggcgcgcgttttctcgatctgcgcttcgagcgaggatatcttgcgctcggtggaggcgagggtcttgcgtgcttggtaggcatcgccgccgacgagggctgcccgggacctctcgtcggcggagtcggcgggggactctgcggcagtttgcccagctgccttcgccgcgcttgcccctgcggctgatttcggtgccgcatctctctcgtcgagtgcgcgcaggaattcgtcgacgccgcctggcatatggcgaatttggccgtcgatcagcgcgtattgatcgtcggtcacgcgttccatgaggtagcggtcgtggctgacgaggatgagcgttcccggccacgagtcgagcaggtcttccataacggcaagcatgtcggtgtccatgtcgttgccgggttcgtcgaggatgagcacgttgggttcttgaagcagcgtgagcagaagctggagacgtcgtttttgcccacccgaaaggtcggcgatgcgggcctgcaggtggcttcgctcgaacccgagccgctcgagcagttgggcgggggtgatgctcttcccgtcgataacgtagcgcgtatgatagcgcgcaagcacctcgcgcactcggtcgcttgcgagatcgtcaagttcgtcgaggcgctgggagagcacggcgaccttcacggttttgccgattttcacacgccctttcgtgggcggaagatctccctgtatgacgcgcagcagcgtggttttccccgcaccgttttccccgagaatgccgtatcgatcgccgggtccgatgagccaggtcacatcgtcgagcaccgttttctctccgaaagactcggatacgccgagtaggtcgatgacctgctttccgagccgagccaccgcaacgcgtttgagttcgagcgggttgcgaacaggtggctcgtcggcgatgagctcgcgtgcgatatcgagatggaatttgggcttcgatgagcgagcgcgtgcgccgcgagagagccaggcgagttcttttcgggcgaggttcctgcgcttctgttcggcgacctgggcctgtcgatcgcgttcgacgcgttgcaggatataagcggaataaccgccctcgaacggctcgacgatgccgtcatgcacctcccacatcgacgtgcatacctcgtcgagaaaccagcggtcgtgtgtgaccacgagcaaagcgccctcgccttgcggccatcgtccgcgcaggtgttcggcaagccaggatatggccttgacatcgaggtgattcgtcggttcgtcgagcatgagcacgtcccagtcgccgatgaggagccgagcgagatcgaccctgcggcgctggccgcccgatagctcgccgacgattccgttccaagggatgtcgcccagaagcgctgcgatgatctcgcggatcgaccgatccgatgcccaggtgtattcgggcgcatcgccgacgaccgcatgctccacggtgtcctcgtcgttcaggttgtcggcttgggcgagcctgcccaccgtgactcctccgcggcggatgatctccccggcatcgggtgcaagcgagccgtcgagcaacgagagcagcgtggatttgccgtcgccgttcttgccgacgatgccgatgcgatcggctgtgcttacgccaagggtcaccgaatcgaacacgcgcttcgttgggaattcgagttcgacgtctttcgctgtaatgagaatcgccacgggcatcctttcctgatcgatctttatgataccgcaagggcgcagacgcaatgcgaaaaacaggcgagcccgccgtgtcgccgtgcgagcccgcctgtttgctttgccgtttcgatgcgccgagcgcgctgcattgtcgttgcaggcggctccggcgggtcggccgattgcttactgtgcgtagatttcaggtgcgggaatctcttcgccttcgagataggcgccttcagagccgtcgaacgtaacatcgaggttcttgtctacagtgaagcggtacgtgacttgaagatcgtcatcggcgggaactcctgcgcgctcgagcctgaacgagatggttccgtcgccttcggcttggctttggaaaatgtaggtggtgacgagaggccctccgacgagatcctcgttgccctgcggttcgacgttcgattcgacctgctgcagagtgctcggcgtttcgccgtcgacgacccattcgtatccggttcccgcattcgattgaagctggatttttatggtttgctggggcgttgccgcgcatgaagaaagcgctgcggcaatcgcgagcgctgcgacgcctgcgacgacgatgcctattctggggagcagtttggtttttgccgatgtgttcattttcttctcctgacccttgcttattcgtgcctgcttgctgccagtatatgagcaattgccatttggtcaggcaaaggtaatctgttcgtttttctgctggaaccgtattgcaacgaaggggcttcttcggagcgctatgcccgatgccgtctctgtcggccttcattccccgatcggcgtgagcaccactttcatgcacccgtcttcatgcgcttcgaacgtgcggtaggcctccatcgcccgatcgagggggaagcgatgcgtgatgagcggggtggtgtcgatgcgtcccgcctcgatgagcgccatcacgcggccgaggcagtgcgcgtcgacgccaccggttttgaagacgaggttctttccgtacatcttcggaagcggcagtacctgatcttcctcgtagagcgccatcaccgaaacgacggcgttgggacgggcgatcttccaggccgtttcgaacgtggcaggcgtgcccgcgcattcgatgaccgcgtcggcgccgcggccctcggtgagcgagcggatggtttcttcggggtcgatctcgttcgggtcgagtacgatatcggcgatgccctctctgctggctcggtccaagcgcgatcggtcgatgtcaagcgcgatgatcgtggtcgcgccgaacgcgcgggcgcacatcatggcgcagaggccgaccggtcccgcgccgatgacggcgacggtgtcgcccggcgtgatctcggcgatttcggcaccgaagtagcccgttgcaagaacgtcgcccaagaacagggcgtcttcgtcggtgacggattcgggaatgggcgtgcagccgttgtcggcgaagggaacgcgcacgtattccgcctgacagccgtcgatgcggcatccgagctcccagccgccctgaacgcagttgttgacgtagcctcgtttgcagaagaagcactcgccgcaaaacgtttctacgttcacggccacgcgatcgcctggcgcaatggctttgacagaggagccgacctcttcgacgatgccgacgaactcgtgtccgagcactgtgtcgggcagtgcccgggaaaccgcgccgtggatgatgtgcagatcgctcgtgcagatggaagagcgcgttacgcgaacgatcgcatcggtgtcttcgacgatgcgcggcagcgcacggtcggcgagctcgatgtgccccctaccgtcgtaaacgacggctttcatggtttgcgcggcgttgtgcatggttgctcctcggtttgcgatcggcgtgcgttttgctgcggatatggtatcgcgcggggggtgggagggcaaggctgggagcggggcggccgattcccgagctgccgagctgccgagctgcatgcatgcgtgtctcccgtgctctcgatgccgtagccgatgccgtagtcgcggctcgtggcgctggccccgagccgcgtgcgtgtcccccgtgagaaaaaagacgacttgaggacaggttttttcggttttgcgtgcctcaaattccaggatgggaacgcgtaaatcgaggccgggaaattcgatcgtttgaccttgttttcttctgaccttaccaataaaggccttttctttcccctgggtatgggtccttgagtatgcgcgaaagcgtacaaaaccgaaaaaacctgtcctcaggtggctgtttttctcacgagtgccctgcggcaaccgttttttctgcgcagacgggtgcgcggtggcgcggtttcccccagtgcactctcgtgcagaaaaaggcgattcggggtcggttcggttttgcgcggttttcggtttcgaagccggcgcgcttttgcgggcgggggctgctcggggggggggaggcgcgggtaggcgccttttctcgctccgaatgcgttttccttctgattcccctacaacgggcggggttattgtcttatgataatcggataccgctggcggtcgtacgaatcttgcgatgcggtcggccgcgagaaagggcaagaaagccgcacgactatctgacgatcgcgccatgaggggacgggcctgtgttcgatatgccgatcatactctatctgttcctcggtggggcggggtcgggcgcatgcctcgtgcttgcggtcgcggggctgttcgtacctcgcgaacgtgtgattgttgtgcggtcgggtcgcgcgaggcgaggcgttcgcacggctttcgcggcgccctccgcgtatcgaagtctgttcgcgcctgcctacgcgtgttcgctggttgcgatgctgctgggtatgctgtgcctggcagccgatctgggcagggcggaccggttgctgcttctgctggtgtcgcccacgttttcgcatatcgcggtcggggcctatgcgtttgcggcatgtttcgtgctcgcccttgtgctcgcgcttgcttgggcgggcgtcgttcgcggcgtttcgcaaggcttcgttcgggtggccgagatcctcttgatccccatcgcgcttatcgtgatggtgtacacgggtttgctgttgcagagcttggcggcggtgccgctttgggcggtattctggcttccggcggtgttcgtgctgtcgagcctttcgtgcggcatcgcgctggttgcgggcgttgcccacctgggaagcgcaggcgctgcgtttgccccgttgttcaggcgggcggtgtttgccgatgcagccgtcatcgtgctcgaggctctgtccgttgcggcattcctcgtcgcgtgtgccgctgctgcgggtgcgtctgcgagcggaacggcacaggcggcggcaagctcgtatacggaattggtcgcaggggcgaacgccgggctttggtggtttggttttgcgggcatggggcttgcgctgcccctcctgctcgaggtcgtgctgctaagcgacgaggcgaaaccgcgtgggctggcgcttgcggcgagtgcttgcgtgctgctcggcgggttcgtcatgcgtttctgcatcgttgaggctggcatgcatcccgtgatcgcctttgcggcgggcggatgatgcggcgagtggatgcggcgcggtgtgcgtggagtggaagcggatgcggcgtgcggtaagaggcgggttacggcggtaggtcggcgcggacgataacgaaacgacggcgcggacgataacgaaacggatgtaaggtgagatatgtttccatttgaggttgatacgacaagcgatgtgcctttgtgggtgcaattgcgccagcggctgatatacctcatcaattcggggtatttcaagccgggcgatcaattgcctacggtgcgcgggctggcatcggacatatcgatcaattacaacacggtgaacaaggcgtacttgagcctggtatccgatgggtatctggaatcgacgcgcggccggggtgtgttcgttcgcgatctcgatgccgaaatggacgaggaatacacgaaagagatcgagcgcctcatggatgattgcgtggctgcatgtcgcgatctcggtttgtctctcgacgatatcgagaaatgcatgtccaagaagatcaagcagatcaaagttgccgagaggcaagcggatgcgagcgaggcgccgttgcccgaaggctcgggtcgaatagtgacgatcgatgttggtgtaaagcgcgcgaagcgcgagggcgaaaggtaggccgccatgggaatcggaaaagacaacgtgtatgcggcagggttctctgcggggcaagcggccgcgcgatcctgcgagggagggccgagtcgcgcaaggcgaaagcagcgatttcaggttgttcccgaagctagtaccgaagtcatgggcgagcgtgcgtcgaatgcaggtgtggtattgttttcggccgttatcttcttggtggcgttttgcgcggtaattggcgctttttgggtggcgacggcgcaggtcggtgtggcgtcgctgctttcggcgctcgtggtggctttgcttgtgatgtcttcggtgcacatagctcagcagtgggaaaaggtcgtggtgctcaggttcggcaagttcaaccgcgtttcgggccccgggcttttttggacgatgcccataatcgagcagaataccatgcgcgtcgacgggcgcgtgcgcgccacatcgttcggtgcggaagaaactcttacggccgatctcgtgcccctcgatgtgaacgccgttttgttttggatggtgtgggatgcgaaggcggcgtgcaccgaggtgggggatttcacgcggaccgtcgaattggcggcgcagacggcgctgcgcgatgcgatcaggcgcgcgggcgttgccgaggtggcgattcgccgcgagcagctcgaccgcgagctgaagcgcatacttgaagagaaggtggcgccgtggggcatcacgatcctgtcggtcgaggtgcgcgatatcttgctgcccaaggaacttcaggaggtcatgtcgctcgaggcgcaggccgagcagcgcaagaaggctcgcatcatcctcatggaggccgagcaggacatctgcgagatgatggacgacatgggcgactcctatgcgaaaaacgacgccgcgctgcgtttgcgtgccatgcatctgctctacgaaagcgtgcgtgagactgggggaaccgtagtggtgccgagttcgttctcggagggattcggcgacgttttgcccgacagcatgaagggcgtcatgggcgagaagtaggacaatcgagaagataattcggtaaaactatattttgcgatctggggaaatacataaatcaccagatagatattatttcaaaaatagaataaatattgcaaaaataatcatatgacaattattgattgtcatatgattatttcgtatagtgcgagtcagacgaatttggccaattccgatgcagacgatggggtgatctacggaattgcacctgctaagcgtaatcgcgatcgcttgcaggagggcagatcgatagatatcctgccagattttaggaggagaaatgtcagaagctaaaggctcgcatggcaagcttacgcgaaggggctttctgaaggtctcgggcgccgctgcgggggcgttgggccttgcgggtgctgcgggcatggttactgcggatgactggctcgcgcctgcaaaagcgcatgccgaatctgaggagcacgtcgcttatacgtatcaccatgaggcgtgtatgggcaattgcagtttggcatgcacggtgagggatgggcgcatcagcctcatccagccgaacgatgccctcgatccgtactatgcgcagtgctgtctgaagggactgtccgaggtgcagcatgtctacggcatcgagcgactccagactccgctcaagcgcgtgggagagcgcggatcgggagaattcgagtcgatcacctgggacgaagccatgaaaacggtcggagagaaactgtctgaggttcgctcgaaatacggcaatgcaagcgttcatgtagcatgctcgggagcgcctgagtatccgctgctggtggacgtgctcggagcttccacgagtggtctgggagacggtctcgatatcggggtcggaaacggattcgatccagcgctcggcgacatcacagccggtgccgcaacgaacgaaatacgcgactggaagaactccaagctcctgatcatcacgagttccaatccgctcgagtcgtccatgatgcaggctacggcgttcttcgatgcgaaagaggcgggttgcgagatcgttgtcgtcgatccgcattattcgacgacggcttccaaggcgcaccgctggatacccataaagcctggtaccgacgcggcgcttttcctcggcatggtgagccgtattctcgatgaaaagctgtacgacgaaggtttcctgaaagcgaacacgacgatgccgttcctcgtttccgtcgaagacggaaccgtgcttcgcgaccatgatgagatcatctcggaagcaggggagcctgaaacgggggaagaaaatccctatatggtatgggatggtgcgacgcagagtgtgaagagctacctcgacgagggtgtcgaacctgtcctcgaaggctctttcaccgttgacggtgtcgtttacgagccggtcttccaacagctgtttgcaaaccagaaacagcacaccgtttcctgggctgcggaaaagacggggatcgacgaggctaccatcgaatcgctggctgatcagtatgcgacgggcggtccggcttcgcttgccgtaggatatggcggaagcgacaagtattccaatgctgacacaaccgggcacgcgcttgcgctgctcggcgcgctgaccggcaacgttggctctacggggcgcggcatgggcaactacctcggcggttcggggtatggagccgagcttgcgatgtggccgctgcctgaggatatgatcgccgctccgtctgagatgccgtcgtacaggttccgcaccgagccgaacaacacgcatgcggtcatctccatcggcaacaccttccaaacctatttcgccaacatgaatttgacgcgtgaatggctcgataccgtagatttcatcctcggaatcgagatattcaattcagatagcgttcagtacgccgacatcgtgctgcctgcttgcacgaagttcgagtgcgacgaggagatcggcggcgtgaagtgcgcgtacaatcatcttcgccttcgcgagaaagtgatcgacccgctgttcgagagcaagacggatttccagattcagtacgagattgcgaaaagcttggggctcgaaggcgcgcttccgaagacggctgaggactacgttcgctttcagatcgaggagtcggaagacgagaccctgcggggcgtgaagctttccgatctcgttagcaaccagggagttcttccgctgccgggcatcgaggagccccgcatcgggtatgctgaccagcagtacagcacgccttcaggcaagctggatttgtactacagcgatctggtcgacttcggtcaggcgttgccgacctgggaggagaacctcgagctgttcgacggtaattcccggatggacacctatccgctccagttcgttcaggcgaggacccgcttccacatccactcgcaattctgcgatgcgacgtggatccagcagcattatacaccgtatctcgaactcaacccggcggacatggaaacgcggtcgcttacagacggcgatgcggtaactgtgttcaacgatcgcggtagcttctcttgccccgttcgcgtcaacgcatcggttcgtcccggcatcgctcgcatatacgaaggcatgtggtcgaagtacatggacggcggaaacattcaagacgttacgaacgatacgaccatcgaacgaggcgacatgctcgtgttcggcccggttattccttttaacgacacccttgtcgaagtgaagaaagcgtaggtgagcgcaatgacgaaacttgggatcgcgatcaacctggatcgctgcattgggtgccacacctgcgcaaatgcttgcaagatgcaaaacaacgtgccgatgggaatgctctggaaccgggtgctgaccgaaggatgcgacgttgtcgacggagccctcggggagtatccgaaccttacccgcacgtacctgcccatcgcctgccagcactgcgagaacccggcctgcctgaaggtgtgcccgacgggcgccacctacaaggacgagatggggcgcgtggagatagactacgacaagtgcatcgggtgccgcatgtgcatggccgcctgcccctacaacgcccgcgtgttcaactgggaggagcccaggcgcgaccccgacttcaactacggggacaaagacgtgccggtgcgccctaagggcgtggccgagaagtgcacgatgtgcaaggagcgcaccgacctaggaaaagagcccatgtgcgtcgtgtgctgccccacaaaagcccgcacattcggcgatctcgatgatcccgagagcgagatctcgaagctcatccgcgaaaagaaggccggcgtgctcttggaagagcagggcacgcgtccgcaagtccattacttcaactaaggggtgcgcacaatgcaaacttcagctaaattcaaagctgccgcgggcgtgctcgcggcgctgacggcggcgggtgtcgccgcctggatctaccagctcatgaacggcctcggcgtgacgggcatgagcaacggcacgtcgtggggcctctacatcacctgcttcatgttcttcgtggggctctcggcggggggcctcatcgtggcctcgtcggcgagcgtgttccatgtgaaggagtacaagaaggtggcgcttccggccgtcatcctctccacggtgtgcatctgcgtggcgggcatgttcgtcctcatcgacctgggcggcatccagagggtgtggcggatcgtcgtctcgcccaacccggcctcgccgctgttctgggacatctgcgtgatcacgctgtacctcgccatcaacgtcgtgtacctcgcgttcatgacctcgaggaagcccggggcgcaggaccgcgtggccgtggtatcccgcttcgcgctgcccgtcgccatcctcgtgcacagcgtgaccgcctggatcttcgggctcgagatcgccaaggagggctggtactcggccatcatggcgccgctgttcgtggtgtcagctatggattcgggtctcgcgctgctgctgctctcgctcatggggctgaacaaatcgggcctttttaagaccgataagaaactcctgacgaacctcgcgggcctgctcgcgacctgcatcgccatcgacggtttcctcatcggctgcgaggtgctcacgatggcttatcccggagctgccggcgccgagacgctgtccattatggcgacgggtgcaaccgctccgttcttctggttcgagatcatcgtgggcatcctgatcccgcttgcgatcctcctgttcgcgaagaaccgcgctcgcatggggcttgttgctgcggcgagcgtctgcgtggtcgtcggcgtgttctgcaagcgcgtgtggcttttgctcacctcgttcgtcgagttcaacgtggcgggtgcgcccggcgtgatctcgggatcatctgcggccgcccatgctgcgggcaccgacgcatgggcccttgccagcgcgtatgcgcccacgtgggtcgagatcgtcgtggtcatcggggccgtgtcgctgggtgtgttggcgttcatgctcctttgcaagaagctgcttcccggcaaccgtgctggtgcgggtgccgggccggccgaaagcgggctggctggcgaagcggcatagtattcgttcaggctgcctgtgctgtgttgtgcaggcagccgcacttcatgcgaccatccgccagttggcggtcgatcgtgggggccgatggcggcgcctgcgggtaaaggagacggcaatggcagccaacattccctggagcgatttggccgacgtgtatggttttatcggcaactcgctgctcaagccaatgacgcaaactgctacggtgggcattgaccccgggttttggggatcctttcccgacttcgggaacgatgggattgccgaagccgttgccggctgcagacgctatgccgaagcctcggtcgcctgcgcggctgggggcaaggatcctgttgagcgcgtgtcggtcgagtacacgcgcctgttcattggaccgccttcccctgcggcaccgccttgggagacgatgtatcgatcggaaaacgtgactgttggattcggcgagccgacgtttgagatgaagcgcctgcttcgcgaggcgggtcttgagctgagcaacgagaaccaccagtacgaagaccatatggggatcgagctgctctatctttcgacgcgctgcgcctctttgggttcatccgtcgagtacgggtcggatgaaatcgatggcgaggccgtcggcgcgcccgatccggcggactcggacgttcgggccgctcttgacttcatcgagcgacatcctctgggttggatcggcgcttttcgagatcgcgttgcccgagcgtaccccgacggctatttcgttgcggtgctcgggcttgcggaaagagtgctgatgtggcatgtggggttggcgcgagatcgggattaacggttcgagcacgaggctatggctgctggtcggcgcttgtcctcgtgctcgtttttcttactcgaacccgttgatctcgtagagcctcatgtcgccttcgctgagaagcagcgtgaacccaggcgtttcgggcgtgaccgattccactcccgcccatttggcggcttcgtagcgttggtcggttaccgtggggttatcccccgcgagatcgtcgagcaggatgaggtatcgcgcgtccacctgccgcaccgcctcttgcacctcgacgtcggtggatatattcgccagccgcgtgcggatgatctcgttcgttgcggagggaaacgggttgctgccgttgtcgccggtgcggcggaacagcaccgacaggccatcggttccgtagcaccaggccgttccgtcgttgggaacgttgacgaccatggcgcctttttcaacgaggccggtcgcccgttgcacgaaagcgcgttcttctgcagtgtagatgtcgtcccatgaatagagatccaccacctgatgccgcatggcgggcagtccgttttctattgtgcgcttcccgaggcttatctggaagggcactgcttggcagaccgcgaaggcaatcgtgagcaccaaggccgcgcaggcgctttcgcgccctttgagcttcggcagccgcgaaagcgccgagccgagaaggcgcataagccaggcgaacccgagtgccgccaaggggatggcgaacagggcgttcatggcgcccgtgcggtagtagtccgagtaccaaaatccagaaatcacctgtcgcaaaactccatcggtgcatacgtttcccatgtagatgacgaatgtgaccgtgtaggcgacggcaagccagagccagcggcgattgcgcagcgatgctatcaggccgaaaagcaccatgacggatagaaacggctggatgccgccccatttcacgtacatgaacgacaggacggacagtaccgcttcgggaaatgacagcagggtgtcccatggcccgtaggtgaccacgccgcgcaaggggggagcgaaatacaagatcgcccataatgcgcaggcgcctgccacaaggccggccgcgcaggcgatcttcttcggcgtgacggttgcccgcccgtcatccgggctgcgaaatatgcggcacagggcataggacgccattcctataacgcaggtgaacgcgccgttcggttggcagagcgcaatggaggcgagcgcaagaaccgctcccgcagcgcattgcgctcgttcgcccctgcggtttgcttcgatggcggatatgaacagcgctatggcggcggggataagagcgaaggccgccatgttgggcagaagctggcctttcgtcaggaagccccacggcaggatggcgaagctcaccgcgaacagcgatccggccaaaacgacctcgcgccaattcgggaacacggtgcgcagcagcaggcacattcccagtggaagcacggcgacggtgaaagcgagcgtggcggcgttggtggcaacggccacctcgccgccaacgcacgatgcggctatggccacgacgatgtgccaggcggaggggtagtaggcccccgcggttccctgatcgacgaaggagccgctgttcaacgtagaataggtccccgtatccaaaaacgcgcggacgatggacagatgcacggtggtgtcgtctttccgtgcgaaagagtcgaacccgtcgatggcggtgaggaacacgaatgcggttacgacgagggctacgcctgcgtacagggcgaaggcctgccaggtgaagcgggacgagggggcgctgtcggtttcgggggttgcgttgatcggtgcggcatgccggccgcgcgatttctcgggttcattgaggggaagggccgctgtcgcgggcgtgcttttgcgccggatgccgtaagccagcccgaaagcgatcagcccgatcgctcctgccgatcccgcaagcaccagtgcatggcagcttatgcctgccatgcgaaaagcaacgcccaggataaccagcgccaaaagcgagaaagcgggagcgacggcaagcgagacggtgcgctcgaacgaaagcgagcgcccgaccaagtaaccggggacgtacagcaccgcaatgcatacggcaacggcgaaaagcagcgtgaaccacataggaacccctcatgagcgcacttgtgcggtgcgcgacgtatccggatagcgttagggaagattataacggtaataggttggcggatgaaagcgcgagagctgaatgcggattgccagcgggttgccagcaccaaggtgttgaggcgagagatgccgtcttcgggttcggttcggtccaaaggctaaaatctgtatctgcgggctgaggcgtcaactaaagagcaatagctataagtacttggaaaaacgggagacgctcttgctcccgtatatgacaccgtgtcatatacgggagcttctttttgtggcatactggttcagatgcagaaaggtatttgcaggatggtgtgagctgcttgtgccattctggtcggtccgggcttatacacggtctcgtttggagggaaggcatgtttggcgcatttgcggtgttctaccttttcctcggcggagctggggcgggagcgattgctgcgtgctcgctcatcgaccttttggcggtgaagcagccgttcggtacgtcgtcgtatggccccggaccttcggtgcgccccctaggacggatcgtcgattacgggtttcttgcgggcttcgtcgcgcttgcggtgggcatcgtgagtttgctgctcgatctcggccgtatcgatagggcgctcgctttgtttttgagcccgacgatgtcggtcatgacgctcggctcgtatgcgctcgccgcgctcggcgtgcttggtgcggtccttgtgctcgtgcggttcatgtacctgtcgttcgtcaagcgctcggtcgtggtggcgcttgaggcgattgcggttgcggtcgcgttggtggtgatgctctacacggggcttctgctccagtcggtcggcggcgtggcgttttgggcgtcgccgctggtgcccgcgctgttcgtcctgtcgtcggcatcgagcggcatcgcgcttttgttcgcggtgtcgttcttcgtggaatgcgaccgtgcttgcgtccgcgtacttcgcgtgctcgtttgcgcggatgcggcagctatcgtgctcgaagccgtttgcgctgcatgcttcattgcgcttgcggggcaaagcgggcatttcggggtgcaggagtcgtttgcgatcctcacgcagggagagctggcacttgtgtggtggctcgggttcgcagcctgcgggcttgcggcgccgctcgtcgtcgaggtcgtgggcattcgagggcgggttgatctgcatgcggcgctagctgtgagtgcggttttggtgctgatcggggcgttctgccttcgatacggcatggtggaagcgggtgtgcaccgcgatttggtgctcgagcccgcaatggaagagacgatcgatctgaccgaaggtctgagctgatgagggagcggggtatcgcgcttgagggatagagaaaacacgaacgccgcgctgttcgagatcgacgagaagagcagcattcccatctggttgcagctgaagaaccggttcatttacctcatcacgtcggggtactacatgccgggcgaccagctgcccactgtgcgcgggctggcggccgatgtcgaggtcaactacaacacggtgagcaaggtgtacatgagcctcgagcaggacggctacatccagtcgaagcgccgccagggcgcgttcgtgtgcgacgtgagcgacaagccaggcgtgagcatctcctcgaccgccgagatcgtgacggtcgagtacctcaaacgatgcttcgagctgggcatgtcgatcgaagatatagaagtgcagttcaccgagtgcttgaacaacgaaaaggcgaaacgggcgagggaatagtcgggatcgcatcccgtgaaggaggcagacgatgcatcgcagaaagcattacgacaccgatatcgtgcaggaacccccgatcgcaggcgcgcggggctccgcggtaagcgatccacggttcgaaacgggtaagcggaaggcgtcgcgcaacggggcggtcgtgttcgcgattgcggagtacggtttgggcggggtgagccttgcggcgctcatcgttgccgtggtcgttgggtggcttgctgcgaactcggttcacatcgtgctcgaatgggagaaggcagtcgtgcttcggttcggcaagttcaaccgcgtggcggggccgggcatcgtgttcacctggcctatcatcgagttctatacgctgcgaatcgatcagcgcgtatcggccacgtacttcggcgccgaagaaactctgacgagcgatctggttcccatcaacgtggatgcggtgctgttctggatggtgttcagccctaagaaggcgacggtcgaggtggaagattattcggcggctgtggcgtgggtcgctcagaccgccatgcgcaaggcgatcggccgcgcgacggtggccgaggtggccatgcgccgcgatcagctcgacgaggagctgaaggtggccatcgaggagaagctgagtccgtggggcatcgatatcatcgacgtggaggtccgcgacattgtggttcccaaagagctgcaggaggccatgtcgctcgaggccatcgccgagcgcgagaagaacgcgcgcatggtgctcgccgaagccgagaaggacatctccgacatgctcgccgacgcgtcggaggcgtacaaggacaaccccgaggcgatgaagctgcgcaccatgcacctcgcttacgagagcgtgaagaaatcgggcggcacgctcgtcattccgagcgcgttctccgagggcttcacgagcgattcgggcgagaaggccgccgaggccgtcgagcgcgccgtgcggggcgagtagggcgaaagatttgccgcggggtcgcaccgcttggccctcgtgtgatactattgctatatctctgtagagttatagcaatagttagaggcgggatatgaaagtcatgaggcttcaccatggttcgggcgatgctgttttgcagccttgctacgaacgatgccgtcctcgtaacgattacggccaagggttctattgcacgcgaagcatcgagctcgcaaaggagtgggcttgccaacagggccgcgacggcttcgtgagcttgttcgatctggatatgggcgggctttcccttgttgatctgaattcggaagaatactgcatccttcactggttggcggtccttctcgagcacaggttgtgtcgactgtctacgcccaccatgcagcaaggcgcagcgtggctgggacgacgctactccgtcgacctttcccacgccgatgtcgttaagggatatcgcgcggacgattcgtatttcgggttcgcgcgggccttcctccgaaacgagattacgcttgaccagctgtctcgggccatgaggctgggagagctgggggagcaatacatgatcaagagtccgaaggcgttcggggctttgcgctttgcgggcagtgagccggtcgacggatccgagtactggcccaaacgcgcaacgcgagacgaggcggcgcgcgccgcctttcgcgaaatcgttctgcaagatgcgggcgggtctgtttcggctttcgatgatctaaggaccggtgtcgacatgcgtccgttgtacatcagcacgctgatgtctatgagcgaaagggagattcgtgcctgcttacagtgaaacctaccttatggacgctatggagaacctcggcgagatggccgattttgcggtgagcacgatgggcgtgccacttgatgatttctggaggctgttcatcgcgacgggatacgcgcgcgagtacggatgcggatcgccgcgtgtcgttgttgggatgtcgggaagcgagatcgccgttagagtgggggagcgcgcggggcttgccgtttccgaacgtgcgcgcatgacggcagcggagcttgcccgggaatgtacgcggggcaaaatgggccttggaggttttggcttgacgtgcgaatactggtgcgggtgggcgatggcgtactatcaatggcaaaccgcgcaatcgttcaaggacatctaccgaacgctgacgatgggcgatgtgcagcgcatgtatcctacgttccacgaggagtctgaagaacgcttcgcggaggcggcaaacgagatgaggctgcggcggggaggcgtatcgcggcttgctgcgcagagggctttggcgggtttgtcccagtcgcagctttcccgcaagtcgggtgtgggcatcagggccatccagcagtacgagcagggtgtcaaagatattaatcgagccggcatcgacaaggtggctgcgcttgcaagggcgttgcattgcagtctggaagacctgctcggggagccgtctcgatgcgagtatggcgtgatgagtctctaggcgcgcttggtcgggcttgtccttggtggggtgtttcgcggggattggttgtagctattatctataaaatagaataactcttgtcatagtctgtcatacatttctattgataatcatagtgacgtatggcagactatgacaagaaagaatcggccgattctgacatggaaacagtggggatgtcccgaaaggttgcaatcgctcggaaagcatgggcaatgcgaggggatgtcttgacgagtatttaggaggagaaatgtcaggagcgaacagcccgcagggcgggctcactcgtagaagctttctcaagacaacggccgcggttgcgggagcggccgcgctaacaggtgcgggctcgatgaccgctttagctgaatataacccagggcaggttgaaacggagaatgagcgccttgctcattgcgtttgtcgtcccaactgtatgagtttttgcaatattaacgttcacgtgcgcgacggttatgtgactaagacctcaaaatggcagctgcctgaaacgccggaatatacgcgcatttgccagcgtggccttactcatgttgagcgcatctataacgaggaacgtctcaaataccccatgcgccgagtggagggtactgatcgtggagcaggggaatgggagcgcattggctgggatgaggccatcgaagaagtggtttcaaagattaaagctacacaggaaaaatacggcaatgcgtctgtggctttttccggttttaccggtaaccaaggcgccttggtaggcggcatgtacagtcggatcaaatctcttcttggtgcatcatcgatttcggccggcaacgacatcgcccctgctttggccctcgcgcgatttggccttggcctcgatggcggcaatgagatttgcgacgtgctgaattcgaaggcagtggtcctgtacggccacaacctaactgattcccaggttcaccattggcatttcctaaaggaagcacaggcgaacggaacgaagatcgttgtcgttgacccaagctataccgtggctgcatcgaaggctgatctttggatccccattcgccccggttccgactccttgcttttcttcggcttgatgaatcttatcgttgaaaaaggtgttatggacacagattttatgatccgtcgcaccgtcgcgccatttctggtgcgagaggataccggtttgttcttgcgtcgtagcgatacgggggtcggacccattgataccggtgaggttgatgcgacaacgggagagccgattgtgtatgatccctatatggttttcgaagaaggcaagcttgtggctctggaagacgcagtcgcccctgagctatttgccgaatacgacttcgaaggagtgaagtgtgctacggccctgaagctccagatggacgagatcgccgaatggacgcccgaagtagtttcggagaagacggatgtttccctcgatgatatcaacgatttgcttgatatctatttggcggggtcggtttattcgaatgtcgcatatggcgtcggaaactacatcaatggcgctcacacgcaagctgcagcctatatggttagcttcatgactggcaactacggaaagccgggttcttcatgcggccttccatggcttgtgagcgttggcaccgacggcgcttttgggtcgccggtgaaaagcaacgcggtgtcctttaaaaacatcgactgggttaacgtggcgaaggggggcggcttcaacgggaccccaattaagatggtgtatttctatgccgcaaatccagtaaataccgctccgaacgttaatgactatcgagacattattttccccagcctcgactatatcgtagttgctgattcggcgatgacggatactgcgcggtacgctgatttagtgctccctaccgcccagcatttcgaatacgatgactttgcggcatatagcactacctatagtgttgcatggaacgacaaagcagtcgaccctccttttgaggccaaggtggacagcgagattgttcgtttgattgccgacaaactcggtttcagtgagtattttggcttcactgatgcagaggcgctccagatgcttcttgagactccggcaaatgtggaaatgggtttgactgtgaatgccttgaaggagaagaagttcattcgctgggaggctccagagccgcatatttcattcccaggagacacgccgtttttgtcggcttctggacgaattgagttctatacggaaaatcccagcgtattgtgggggcaggtgagtacgaagacgatttccgaagaagagagaaggaagcaccatcttacagctacatgggttgagctgtctgaaaattggtacgagaaggatatcatgaaaaagtatcccctctcgtttttgagtttccgcggtcgctttcgggtacattcccagtatttcaccgttggcattctgcacgaaatcgatcccgagcctattctttacgtcaacccgatcgacgctcaagcccgtggtgtggaggacggcggctacgtcgaagcgttcaacgaccgaggacacggcgtcggaagggcggtgtattccgagtcggtacgtcctgggacggtcgtctacccaaagggctggcaaataagtcagcataaggctggcagctggagcgagctcctcaatccagattttactccgtggacgtgtgcaaacaattttccggataccgtatgcgacatccgaccctggaatgaggagggcgagaaccgatgagcgagaggcttggctttgtcatcgacgcaaagaactgcgtcggatgctctgcgtgtatgacttcgtgcaaagtggagaacaacgtaccccgaggtattttctggaatagggttcttacggacggcggcgtaaatcagaatacgccttctggaaaatatccgaagtcgggggaggatcccacgctaaggatggactacattacggttgcctgccagcattgcgataatcccgcctgcgtgaaggtatgccctgtaggcgcaacgtacaaggatcccgagaccggcgtcgtgcgccaggattacgacaagtgcatcggctgccgcatgtgcatggccgcctgcccctacacgggcgtgcgctcgttcaactgggaggagccgcggagtttcatcgatcatgcgatgggcgatgccgatgttcccgcgcaccagaagcatgtggtcgaaaagtgcacgatgtgttggcataggcttgctaagggtcttcagcccgcttgcgtcgaggcgtgtacggctaggatccgctacttcggcgatctcaacgaccccgaatcggaggtatcgaagcttattgcctcccgggaatataagcagcttctgacaagcgagggcaccaacccgtccgtctactacctcgtctagccaaaaggagaacacaatgtctgagaacataggggcggcaaggccgtcatcggctcctgctgccaaattcgggggcaagggcatcaacgtcgccatcgtcatcgcggcgatcgtgaccgtcgcggggctcgtcctctggggagtgcagctttcgggcggcatggttcagaccggcatgcgcaacctcgactcgtgggggctctacatcaccatgttcatgttcctcgtgggcctgtccgcgggcggcctcatcatctcgtcggtgcccaaggcgctcgggcttccgggctttggcggcatctcgaaggtggccgtgtggacctcgatctgctgcacggtgctcgccatcggcttcgtggtcgtagacctcggccagcccctgcgcctgtgggagctcttcgcatactcgaacctgagctccccgctcatgtgggacatcgcggttatcgcgacctacctggttctgtcggtcgtctacctctgggcgacgcttcgccacgaggcgggcaaggtgtccgccaaggcgctccgcgtcgtctcggtcatcgcgctcgttaccgccgtgctcgtgcacagcgtgacggcgtggatcttcgccctgaatgcgggtcgcgagatgtggcacaccgcgctcatggcgccctggttcgtctcgtcggcgctcgtgtgcggcaccgcgctcgcgctcgtcgtggtgatcgcgctgcgcaaggcgggctacatggagctcgagcagggcaacgtcgtcaagatgctcaagatgctcggcgcgttcgtgctcgtcgacctgtacttcttcggctgcgacctcctcaccgagggcttcccgggaggatcgggcgccgaggtggtctcgatgctgacctccggccccctcgccccgttcttctgggcggagatcgcgctgtgcgccttcgccgccgtggtcgcgttcgtgcccgcgctgcgcaggaacggcctgatcgtggcggcgtcggttgcggccatcgccgcgatcttctgcaagcgcgtgcagctgctcgtgggcggcttccaggtcgtcaacatcgacctgccgggccccgtgacctccatgacggtcacgaactgggagtcgggcatgcagggcgcctaccagggcatggtctactggccgaccccgatcgagttcgggatcgcgctcggcgtgttcggcctcggcgctctcatcctgctcctcggcctcaagttcctgcccttgaagcctgcggagaactcgcactagggaaccccgcccgggcccgcctccctcccccgctgctgcgcgggggcggcgggcccgggctctctttaaggactcgttatggtgaagaagacccttgcaaccctcgcggcgttcctgctcgtcggcgcctgcgcgttcggcgccggcgcgctcgccgacccctcggtggggccgccccaggcgatagccgaggactccccgtgccccgcgacctcgtgcgcgccgggggagtgccacggcttcggagacgtgcccgagcccgacggggtgaccgagatggagtgccccgaggcggcctgcgcgtcggccgagtgccacgcgtgggacacgctcgcggagcgctactacagcccctcggacgccagcctcaacctgtggctgctcgcgcccacagcgctcgtggtggggctcgtgctgctcgtgaagaaggtgaggtagatggacaggaggaggctcttcgccgtcgacgccgccgccctcgccgtgtacctcgcggccgcgacccccgcgctgacgggcgtcgccgtgcacgagtggctggggctcggcgtgttcgtcgcgttcttcgtccacgccgtccagcacgccggctgggtcgccgacgccgtgcgcgcggctctcggctctcccgcgcccgcgcgggccgcgaacctcgcgctcgacgcgctcgtcctggccgccttcatggtcgtgaccgtgtcggggctgctgatatcgggcgcggtgctgcccgccttcggcctctacgccggaggctactacttctgggatcccctgcatgcgatagcggccaaagcacttttagcgttgcttctcgttcacgtcgtcgttcactggaaatggctgtacaatttcttcaagaagagaaaaggagccgcgcacgacaggcgcgacgacataggaggaacagatgactgaaaccgagtcgaacccgaccgactggcagatccaagcgacggcctacgagctgctcgcattcaccttccgctacccgggacccgagctcgccgaggccgtggcttcgggtgagtgggccgacgccgcccgcgaagtggcggaggccctcgcgctcgggctgcccgaagggtggggcgaagggctcgtcggatacgaggggcgcgacgctgacgagctgcttcatgcgctgcgagccgaggcgacccgcctgttcgtaggcgcgcccgagccggccgtgagcccctacgagggcgtgtggcgcgccgccgacgacggggtgcaggcgcttctgttcgtgaatccccactcgatggaggtcgagcgtttcatgaagtcgtgcggggtggggcgccccgagggcaccaacgagcctttggaccgcgccgacaccgaactcgagttcctgcagtacctgtgcatgctcgagacggggctcgccgaggcgcccgagggcgtacgtgtccccgaggacggctgggccggcgcgcgcgcccgcttcctcgaggagcacgtcctcgcctggatgccccgcttcgccgggaagacggccgccgagtcccgcgagtcgttctaccgggcggcgggcgagcttctggctgaggtgctcggagattcctcggtttcctcctaaaccccgaaccttacaccagccttacattagtgaagatattatcccagttcgaatgctgcgtgggggacgggtgggccgaccccctatactgacggaagccgaattcggcagagggggttccgtgcggggctcgcctcgaaagccaaggatgagaggcacgcaaagagcgcctgtcctcggatgccgaaatacgcgggcatgttcggaagggcggtgctccattcgacgggaaagggcgtgggccagtggcgattgaacgtgtgcgagcggttgcgcgcatcgtggcgactgcctgcttgtgccttgcgctcgtctccctcttctccgtgcagatgcgctacaatgcggcgctcgtcggttttttgcccgtgccccaggcgaacgcatacgaagaggaatctgcacagcagatgcaggcggggggtagggctacggtgctcgcctcgtactgcagcgaagtggttgccgcaaacgatgcccagaacaaatcggggcttacctcgacggcgctcacattcgacgatgcctggtttgcaaacagctcgcacgaatacaaccacggccttgccacggcctgcgcgatcctgagcgcggtgtgcaattcggaatcgcagttttacggcagcatagacggtgcggttccctatgccgagaaaacgcttggagcgctcgggttcgaaaacgtgcgcaccgaatcgtatgcgctgagaagccatccgctcgatcaggttggtgcgttttttgcgggttcccatgacgtcgccgcctacgccttcgcctcgaaaacgctcccaggcgaggttggccagcccgatcaaacactcgttttcgtcggcattcgcggaagctatggaatcgaatggctcagcaatttcaagctagttggagatgcgggcgcgggatcggatcactggggcttcaagatggccgaaagcgaggtcatgaattcgcttgaatcgtatgtcgatgaaatcggagccgatcccgctcatacgaagattctcgttgcggggcatagccggggcggagcgatcgcgaacctgctcgccgccgagctcgacgacaggagcgaaaccgacgcttcgctcgcttctgcggattcggttttcacgtacacgttcgcttcgccgagttcgacgcaagcggagggacgtgcgaactcggcgtacggaaacatcttcaacatcgtgaacccctccgatgtggtgcctgctctcccatcgttttcctggggattcggtcactacggaacaacggttgcgcttcccgaccccgccgacgagggcttctcctcgtcgtatggcgccatgcaggcggcgtttctcggcaacacgggtttcgagaacccgtgcggcaccgaagaccttgaacggctcgatgaattcggggctcaggtggcccaagccataccctcgctcgaagccctcatgagccccgtcggcatcgcgagcgcgatccagacggttgcggggctcgatccgacgacggccctttctgcccactatcccgatacctacattgcgtggatgcagagcatcgatccccagaagctttctttctcacgataatcgtgcattcgaagcggtatactcgtaacgattagcaaaacggttatttttaccacagcaggcgcggggtcgaatgcatcttcccgcgcaaacgcacatcggattacgtatcggcacaggctcaaggagtatacgggtgaacccgcttttcgataatgccatcgaattcgtttccgacacggttcggcggttctacgcaggtgcgggcatcgagaaggtgaccgagcgctttaccgatgatttctgctggatcggtgcgggggaggtcgagtatttcactcgggcggaagaagccgtatcatatatgtcggagcgtgcgccccttgctccttcttgcgaggtgttcgaagaggaatactcgcttatcaacgtgaaggagcgttcctgcacggttatggggcgctaccgcgtgcgcaccgatccgagttccgggatggtgctcgaggaacaccaacggtgcagctacgagctcgttgatgcaggtggatcgctcagaatatgccacgtgcatgtttcgaatccctatcaggccatgaaaagcgaatcgtattttcccttcgaggcgggatcccataactacgactacctgcaacagctccttcgggaaaaaaccgaaacgatcgacctcatcaccgagaacatcaacggtggcctcaaggtgagcgaggatgacgaattctacaccttcgcctacgtgaacgaggggcttgcccgcattctcggctatacggtcgaggaattcctggaaatgtgcggcggaacggcggtgggggccgtgtatccccccgatttagcatccgccctagacgacgtcgctcgatgctttgcggacgggccctcctatgaaaccgagtaccgtgttcgccgtaaagacggaacgttggcttgggtgctcgatgcgggccacaaggtgcagctggccgacggatcgaggaaaatcagcagcgtgctcatggatatcacgtcgcgcaagcaggccgaagaagaccttcggctcgagcaggaacggtatcgcgtcgcaatgcgcagcgtgaccgacgtcatgttcgaatacgatatcgagcaggatacgctcatcgagtatcagcgtccgtctagcgctctggatgatgagcctctgcgcgagcgacgttacccgggctaccgccaggaaatcgaatcgggaaacctcatctatcgcgatgatgtcaagcggctttacgaagccctgcaaagcgaggggtcggtgacggtggagctgcgccatgcgtttcccgatcactacgaaggatggcgttgggttcgcctccatgcgacgatgattttcgatcaggcgggaaaacctgtgcgagccatcggcagctggaaggatgtgaccgatgagcatgatcgcatcacgaggctcgaagaccaggcgcggcgcgatccgctgacgaaactctacaaccacgtttcggccgtcgatttggtggagcaatcgcttccgagctgtctcgctgaaggcaaaggagcgctgttcgttatcgacgtcgacgatttcaaggcggtcaacgatacggtgggccatcttgtgggagacgatcttctcgtctatgttgccaagacgattcatgaaacgttttcgcgccttggcggattctccgctcgcgtcggaggcgacgagttcctggcttttctgtctcattcgaatcgcgaagaggcgcgcgaggcggcatcgagcctcgtcggcgctgtcgagagcgcatccgctttgccgcatgccgtcaccttgagcgtcggggtggccttggtcggcgagcatggcgaaacctacgagcggctgtttgacgcaggcgaccgcgcgctgtatcgcgccaaacgggaggggaaggatcggatctgctttttcgagtaggttcgggcgggccgccgggcgctcttgctcgttttctgctggtttgaggcgatctgccgggaggaattcgtctctggtaccatgggttcattcaaacgaaacttccgagaaagagcaataccgaccatggcagattacatcgaaggcaagcgtccggttatcgaagcgcttcgcacgcacgtgcccatcaagcgggttctcatagccgacaacctcactcgcgacgggctcgtggaggatatcctgcgcaaagccaagaaggttgacgttcccgtgaaaacagtgcgtcgccgcgatctcgacgacaagtcggagcgcggcagccatcagggcgtcatggccgagacgaagcccttcgagtactgcaacgtgcagaccattctcgatgcggccgatgcgcatgccgccgaccacggaggcgccgcactcgtgatactgctcgaccacatcaccgacgcggggaatctgggcgccatcgcccgatcggccgaggtggtgggtgcaagcggcatcgtcatccccaacaagcgaagcgcgcatgtgaccgccgcaacttacaagagctcggcgggcgccatcagccatataaacgtgagccaagtcgcgaatatcgctcaggtgatggatcgcctcaaaaaggaaggctattgggttgccggcgcaagcgagcatgctaaggaagtcgtatgggattccaatctcaaaggcaagattgcgcttgtgatgggcaacgagggcgaaggcctcgcgcgactcacccaggagacgtgcgatttcctgacgaagctgccgcaggcgggcaacgtcggatccctcaatgttgcgcaagctgcgaccgcgtgcatgtacgagtggatgcgtcagaaccgcgcgtagttcgatcatggcaaagaagcgtaggaaaatcctcatcatcgatgggtataacgtactccgctcgggcagccgctacaagcggatatccggccccgactacaccgacgatgcgttcaaccgcgcccgcgagacgctcatcaacgacgtggtgagctatgcgggacacgagtggggagccgtcatcgtgttcgacggtgcaaagaacaagttctcaacgggcgaggccgagtcgatcggcggcgtgcgcatcatgttttcgccttcgggccaatcggccgacaaggtgatcgaaaagcttgcgcacgatgctcgcgagcgcggcgtcgaggcgctcgtggtcacaagcgatgcgacgattcaggatacggtgttcggcgggggagtcgatcggatgagcgcgaacgacttcagctgggagatgggcaacctgcttgttgaaaacgaactcgatgcgaccccgcgcgtgtccaggaagaacacgatcgccgatcgcattgacccctccgtgcgtgccaagctcgaagccctgagggattccgcgagccgctaacgcgagccgcgccgccgagcggcttcggctggtgcttcacgtgcggccctggacggtgcctctgccctccgtccacggctctaaaccctcgctggcccccgtctccgcccgcggccccgagccctcgctcgtcctccgccttcgcccgacgctccaggacctcgcccgcccgctgctccgagccctcgtccgctgtaacgcaggtcgaggcggtctcccccttgtccgaacgcttctgtttgcgcacctaatttcatttgccgcatgaattcgagcgatttgcggaattcgggttgactgctctcgtgaaaagaagggcgacttgggtgcagattatttcggttttgtgtgccaaaatctgaagatgcgctttccttctcgtcggcgagggatcgtttgccctgatgggaaagtaggtcattacagttttgctcacgatggcgcggtaatcggcgtacaaaaccgaaataatctgcacccaggtcctgcttttctgcacaatggggctttgaaagctcagcgcagttggcggcgcatgatttgcgattcaaagctctgccgtctttccgtcggatcggatcttgtcgaaaagcataagccgatagccccgtatgcggttatgggttagggtgtgattgcttttcgtgtggcggcgcatttacggattgcgtgaagctcgttggcgaatcggggtttcgtgagctcgctgccaaaaaagatgcgaagagggccttgcgcaattcgtatcgtctcgagagggcgttatacggttgacggcgaactttaccgcccatttttctgatcagcaggtttgcaaccttttccagctctcgcgcatcgagcacttgagctttcgttaccgttacgacggtgtagccggcggcgagcagggcggccctgcgcttcgaatcccgcgcaatctgctcggagcccgaatgacataggtcgctatcgtattcgacgatgaggttatgggagcgccataccatgtctccgcggtaaaatgcgccgcatgggaagggcttgcctgctgttgtgcgatcgatggctccgttgagctccgcttgccccaccccgagcccccctaatgaacgggggaggcaaagcagcatggcttgaatcgattccatgggcgaggcggagttgtcttgcacgaagcgcagtgcccttcgtgccgccttggtgccagcgaggggcgcggccttgtccacgaaccgctggattgaaagtgcgcttgtaagcggaggccgcgtgcgaaacccccgatcttccgtttcgcttggggcgtagctgccgcagagctcgtagcccaggagaacgagctctgcgaggggaagacggcgagccatctgaaggaatagcaagttgggagagctgacgagcacgttgctgctgattcggaggaaggatccgtcggggggcagcgcgctggcggtatggcaggtcactaacttcgactggctccttgccgctgcgtttgctaccacgaggtggatggggctgcccgaaaccccgaagctgggaagggcggcaaggtcgatggctttgcgatcgggtacttgcttcggcgaggggagggcgcgcgagaacgacggtcttgcatccgcatgttccgactgccagaactccaaagccgattcgtatccgatgaaaatgcccatggtacgagcttatcacgtcgaccttaccgcggttgagccgcgatctgtccgattccttacacgaatcggaatcgggccatcgtggtaatgtatgaagttgagaaaagattgttttcaagcgaaatcccatttcacacgtggttgcaaccagcggttgcgtaaaatgcttaccagacttgctggtgcaaccgccaccgcaacggtaccgttggatgcgtcgacgaaagagaatcatcatggcccacacaccacggaaggaaccattcatgaacgtcgagatagcacaacggctcgccgagctgagacgcgagaagggatacagccaagaagagctcgccgagcagctcgggctttcgcgtcaggcggtatcgaaatgggagcgcgccgaatcctctcccgacaccggcaaccttgtcgcccttgcgcggctctacggcgttacgctcgacgagcttttgcgtttcgacgaggatatagaagacgacataaagtacgaagcgcaggatcgcaccaaatcggccgagacgaaagcccaagacgctgccgagaaggcaagcgtggctgctgcgcaggcggcggcagcggccgcccaagcgcaggcggctcagactgccgtgcacgcggcccaatcgcagcagcctgcggcatcgccttactacgcggtaccttcgcagccccaatcggcttctgcagggcagggtccgcaagcgggcacggtgccgcctccccccacaggggcgcctgtgccgccgtacgccggggcgccggcgatgccgcaggatcccgcggattatcccatgggaagcaagcagtgggaagacgcttacgtcgatcgcgagatgcgcaacgccatgggcgatatcaacgacggtgctcgccgtcggggcgcgtggtcaagcttcccctatcccgtactctgcgtgatcgtgttcctgctttcgggattcttctggggaaattggcatccggcatggatcgtgttcctcacgatccccttgtactactacatcgcccacgtcatcgagaatgaccccaacaacagaaggtaggacccgccatggcacggttgacaggggcgtcctacgccaaaattacagttgcaatcctgctcggcgcagttctgctcgccgtagtcggattcggtgcgagctgctcgacgtggcagccgagattaggaagcgacactatgataggaagcgcaagcgttgccgcaagcgacgtcgaaaacatcgaggttgactgggctgcgggctcggttcagatgcacgtggtcgatactgcctccgacgagatcgagctcatcgaaacgggcgacgggatcacgaagggcagggaaatgcgatggaaggtttccggcaatacgctttacatcgactacggcggatggttcacctgtttctcgtggggccacaagagccttgagatccgcgtgccccagaaatacgcgagcagccttggcacggtggacatcgacggcgcatcgggttactacaacgtgaccggaataggatgcgacaggctcgatgtcgatctggcctccggcgagttcgaggcgaacgagtttgcggtgcgcgaactcgcaatcgatgtggcgagcggaaagtcgtacgcaaacggggaagtgaccgatacgctcaaggcgcatgcggcttcgggcaggatcgaagtggtgagcacggcttgcccgaactcgatcgatgccgatatggcaagcggcacgattgccatatcgattcccgacaacaacggcttcacggcgtacgtcgacaaggcatcgggctcgttcgaaagccagttcgaaacgactcagcgcggcgatggcgtgtacgtgcataaggacggcggcgcaaacttcgacatcgacatggcgagcgggaagttcatcctgaatcgtctgtagcttggccgaggtatgcgcgcgtcgcgctgctctgcactgctcaatgcgacgcgctcggcatgcgaagaaaagacccagggcttcagggccgctgggtcttttcttcttgtcgttcgccttggaagccgaggcccttaccgcctcgctcgcccatgcgctacgaaagatctaccgcaacgccgtcgttgggcttccaggtaacggtatcccatgtcagggtgattatgaacgctttggtcgtcgcatgcgagatcgaccactcgtcaccgaagaagcgaagctcgcttaccgacccgtcgttttgggcgagcagcgccagtgcgcgctcgttcggggtcgcgccgtccgttaggaggatgggcgacttgtcgcgtccctgcagcgccccgcccgtgagcgagtcggcgtgcttgtcgccgcgcgcgatagcgggcttgctccacgcgagcctttcggcgtcgccgcgctcgggagcggtcgtccagctcgcaacgagcgtggaggtgtggtagcggtcttcgccgccgaggcggatgatctgtgcatcgggtacgccggctgcggccttcgcctgggcaacgaccgaggcgggcacggagtactcgtcgccgagcacgaggattctgtcaaagccgccttgcgccagcgcttctttggtttcgtcggtcaggctggtctggccgaactcggtcaagaagatcgggcttttggtggctgccgaccacgacgatatcgtcagcgaatcggggaagtcgctcgatttggcgatgacggccgtattcgagcgcgccgcgccgacttcgcggttgatgatctcggcggtttcctggcggtcgtctccgccgaggcgctgcacctcggttacgttcggaagcgccttgaccgcgctctcgacgtcgttggatatcgcgtactgatcgccgatgatgataaccttcttggcggcgaggtcgccgtcgatcgccgcttgggcgtcgggtgaaagcgagtcggttgccgtgagcacgattggcgcgttgccgagatgccccgaaagcgatgaagccgtcagcgcgtcgggaaagtgcgcatcgtcgcccgaagcgaggatgatggtttcctcggtcgcgcgctcgtaggtcgagacctgtcgcgacgtctcgtagcgatgctcgccgaacaggcgggctacgtcgagccctatctcggcgggcgcatcggtatagcgcgcgtacaggtgcatctcgccgtcgtcgagatcggcggtttgggcggtgaaggtagcgcctgggaggatgagcgtttcgccctcgacttcgttttcggttgtagcccatccggcgagccgcatgttctcgggcgcctcgtacgagccgccgagatccgcgagccgcttcgccgtaacgtcggtgagcatgccgtgcacgccgtcggggtcggttacctgcgtcgagctgtcggtatggtagatgagcgtgacctgttcttcccaaaggggcataaagtaatggtggctgccttggatgacgtagtcgtcatcggcgaagattgcgctgtcgttgtagccgtacgccttaagaagcttgtcgttcacgccgtaggatacgacgtagggctcggtgccgtacccctcgaactcaacgggcactccgcccgaggtgagctcgccgatggggaaaacccagccgagcaggcgcttgccgtcttcgtgggttgccacagctcctctgctctcaagcaggcccgagaccgtatacgttcccgagttgaatacgcgctgaacatcggttcccttgtcgctccatatcgttcccgtccccggcgtcaggaagtacgtcgtgaacgcgatgcacgaaatgtcgtagttgttcatggcgtgggtgggggcgaccatggcatcgggagcctgagctgtgatgccggtgattcccgtgacgttcgctttgtagtgggcggcgaggggggagaagacgagtcccgatggaatgcaggatcgcgggttgtcgagatcccagttaagctgcttggtcgcggcgtagttgtcctcgaagtacgctcctttgatggtgaagtaggtgtacgggttgcagcgcatcgccccgccgtcgccgttcgttgcgctgttgctgatgaatctcgcgtcgatgagggcgaatccttcgccggacagagccccgccgctcggcgccgagttgttggtgaaggtgcatccttcgaggacagagtatttgtcgtatccgaggccgttctggtagattgcacccccggtgagcatgtatgcgcccgggtcgactccggcagtgttgccgtcgaaggtgcagtcggtgatcgtgtgattcccgttttgcacctggattgcgcccccgctgtcgcccgcggcgttgccgttgaacgcgcagttcgagagcgtaagcgtgctagaaccctgggagttcgacaaaacaccgccgtagcctgctgcgtagcaatcgtcgaacgtcgcgccggataggttgtgggcgccgcgcgaaaggagcgcaaagccgccgttgccgcccgagcgcgttccgcttgcagagccgccgaccattgtcaggcttccgccgtagcttatggatggggttcccgaggagtaaaacccgccgcttgcggttgccgatacatcctcgatcgtgcagtcgttcagcttcacggccgatccgtagttgaagatgccgccgccgcttccgatgccgtgcacgcccgtcatgacgacgttgttccagataagcgtcgtgaagtttcctcctacgtgcatgccgccgcctgccgtgcgcgcatcgagcgccgtgctcgggtcgatgccttcgttgtgtccgacgagcactgcgttggcaagcgtgaccgtgcgggaggcgctgccgtccacttcggcgtcgaagtgaaggccgtcgtatccgtcggcgagtccaatgcgatacccgttgccgtcgatggtgatcgccgtgagggatcggggaatgtagatggggacgtccgatgcgtcggaccaggtgcccgcttgcggatcgaacacaaggccggtgccgtcgaggacgatgtcctgcgtgagttcgatcgtgtcgccgttcgaggcgccgatgagggcttcttgcagctccttttgcgtggtgatgtcggtcgagagggttccgatcgaagcgtcgtcgcttacgatcggggcgcccgcgtcgggcatggccgagaggggggcgatcggttccccgtcgcaggccggcagttcgattatctcttcggtgggatacccgtctgccgaaacgagcgtatcgtcaattgcgatcggttcgggggggggggtgcatattttccctcgtcagcctgcgcgggtgccgcccaggcgaacgaaagcgccagcatgcccgcaagcatgacggcgcacggttttcgtagtgcggttgtcatatctaacctcctgcgtttccgtaactaaaaagtcaattagttacattaatactggcagaagtataacatcatgcataaattcatgtaagatatttcattataagtcgaccagcggtttggcgaaatcgcccgtttgcgttgttcgaaatagggctccatccgaaccggcgagcgcgcttggcgtccagatgcggcactgggatttgcctgcgcgctttgcttcgtacagcgcctcgtcgcttcgcctgatgagctcgtcgatggagaggattccttcctcgtcggcggctatgcccatcgatcccgtcgtgcgtcccggcgcgctgtcttctgcgaatcgcgtgcggatcgcatcgagacacgcatgtgcccgaccttcgatggatccgacatcttgcagtccgaagatcgcgaccacgaactcatcgcctcccatgcgcacgcaggtgtcgttcgggaacgcttcgacaagtatgctgctcgtttcgacgagcatacggtcgccgcgctggtgtccgtaatcgtcgttgatggatttgaaatcatcgaggtcgaggtagacgagcgttaccgggctgccgaggtggtccgaaaggcgttcgtagaggtatcgtctgttgtagagtccggtcaggtagtcggtattggcgcttttgagcacgcgctgctcgagttcgcgctccttcgtcacgtcgcgatagatgcgcagctgcccggttttgtttccgaacacatcgacgatgtcgcgctgatttacctcgaaggttttctctctttccccgatcacggcggtgaagaaactcgaatcggagaaatcgtgcgagttgacgacggcgtctccgagcacgagtctcctccactggtcgaaatcgccgtcaaccacggaaccgcgcttcaccccgaagtactcttccgctttctcgttgatgttgatgatggagttttcggtgttgaggacgatgattgcgtaaggcatgctgttgatgaagatttcgagttcggtttctatgttgccgaggtcggttacgtcgtgcgcgatgccgacggtgcccatgaccgatccgtcgtagtcgaacagcggcgatttgtaggtcttgaactgcctcatgccgtgggtcgccttgatctgttcgtcgaacagacacgttttgcgcgcggtcatggtctgctcttccgattcgaggcaaacgtattcgccttgggaatattcttcgggcgtgatgttccagatatagtagtgcccgcgtccctctatctgctccttggtcttctcgacggtcttgcagaaggcgctgttgactttgaggtgggagccgcgcgcgtctttgaaccatacgagctcgggaatcgaatcgattgccgtatcgaggtattgccgagcgagcgaaaggtccgcgaggctcttttcgccttcgatgatcttcctgaagcggaaggcgacgagcgtgggcggcatgggtttgagccagatgtcgtgcaggatcgcaagatccgcatcgtcgagttgggccgcttcgatctcggtagcacgcaggacgactttgagacccgttttgacatgaggaaggaacgtgcccgggtgcaccagttcgggaaggtcgagtatcgcgatatcgctggctgcgaatgcatcggcgtcgaatgcggagtaggcgtcgaacctgatttcgaaacgatcggggcagggtaccgaacggattgctctgccagccccatcgtcaaggccgaacagcgcaacgtgaagagttctgtggtacatcggtgccctttccccgagtgcgccgtcgcgcagaattattgatgattgcattggtcgtattatgctccaaatacgacaattgggaaggggtctatgtcgtttcaggtcgaatcagtgaaaatcgcactgatcgaacgggctatgctgcatgttcattgctgcgatgcatttgcgagggcgggtttcagggggcttcggaaggcgaagccccgcagcggcattgcctttcgcgcaagcggatggatgtcttgcggctgcgggtggctgcgtccgcccgcccgtcatctgcgttacccgcgtgcgctgcactccccccgcaagcactgcgaatctgccgccaaggcatcaaaaagtcatatttgcgaaagcccaggtcgctctcataaaatcaaaaaatcaacacactttaaaaaactttttcttgacgagagggtaacagggaagtatttttagaaattgcgactttttcgcagtttacctgattctcatgaaggaggaacagcctcgtggctcaagcaaaaaaaagtgctcccaccagcctttataggaatcgcagaagctttgccaagatccctgacgtcatggacgtccccaatttgatcgccattcagacggatagtttcgaatggttcaagagcgagggtttggcgcaagcattcggcgatatcagcccgatcgagaacagcacgaaggacatgtgcgtcgaattcggcaagcacgagttcggcgagccgaagttcacggtcgacgagtgcaaagagaaggacgtcagctaccaagcgccgctcttcgttgagatccgcttcatcaaccgggaaaccggcgagatcaaagagcaagacgtgttcatgggcgatttcccgctcatgacgccgcgcggtaccttcatcatcaacggcaccgagcgcgtcgtcgtctcgcagctcgtccgctcgcccggcgtgtacttcgcctccgagcgcgacaagacctccgataagaccatatacaacgccaaggtcattccgtcccgcggtgcctggctcgaattcgaaaccgacaaacgcgacattctgtcggtccgcatcgaccgcaagcgcaagcagccggccacgctgcttctgcgcgccctcggccttgccgaaagccgcgaggagatcatcgagcttctcggcagcgacgagatggtgctgcgcaccctcgatcgcgatccggcaacgaccaaggaagagtcgctgatcgaactctacaagcgcttccgtcccggcgagccgccgacaatcgattcggcgcgcacgctgctcgagggcctgttcttcaatccgcagcgctacgatctggcgaaggtgggtcgctacaagatcaacaagaagctcggattcgatcccgattacgaaagctctacgctgaccgacgaagacatcatccgctcgatgcagtacatcgtggggttgcacgccggtcaggagggtttttcgaccgacgatatcgaccatttcggcaaccgccgcatccgcacggtcggcgagctcatccagaaccagttccgcatcggcctctcgcgtatggagcgcgtggtgcgcgagcgcatgagcatgcaggaacccgacgagatcacgccgcagtcgctcgtgaacatccgccccatcgtggcggccatcaaggaattcttcggaagctcccagctctcgcagttcatggaccagacgaatcccgcagcgggcatcacgcacaagcgtcgcttgtcggcccttggaccgggcggtctttcccgcgagcgcgcaggcttcgaagtccgcgacgtccacacttctcattacggccgcatgtgcccgatcgagacgcccgaaggccccaacatcggccttatcggctcgctcgcaacctatgcgcgcatcaacccctacggcttcatcgagacgccgtaccgccgcgtcgaacatggcaaggtgaccgacattgtcgattacttgactgccgacgaggaggagaactttacgatcgcgcaggccaatgacgagttcgatcccgagacccgcgaattcggccgtaccgacgagaacggcaacttcgtcaaggcgacccgcgtgctctgccgcaccaaagactccaacggcgtcttcggcgagcccgacgaggtgccggtcgacatggtcgagtacatggacgtgtcgccgcgtcagatggtatcggttgcaacttcgctcatcccgttcctcgagcacgacgacgcgaaccgcgccctcatgggttcgaacatgcagcgccaggccgtgccgcttctgcgcccgtcggcgccgcttgtgggcaccggcatcgagcaccgcatcgcggtcgactccggcgagatcctcgtcgcccagaacccgggcgtcgtcgattacgttgacggccagaccatcatcatcctgaacaacgatggagaatacgacgagtacctgattccgaagttccagcgctccaaccaaagcggctgcatcaaccaccgcccgatcgtccgcaagggcgacgaggtgcaggccggcgacgtgctcgccgacggccccagctgcgatggcgcagagctcgcgctcggtcagaacctcatgatcgcctacatgccgtgggaaggctacaactacgaggacgccatcatcgtgtccgagcgcgtggttgccgaagacctcctcacgtccatccatatctccgaatacgagatcgacgcgcgcgacaccaagctcggtcccgaggagatcacccgcgagatccccaacatttccgacgatatgatctccgacctcgatgccgacggcatcatccgcatcggcgccgaggtgtttccgggcgacgtgctcgtgggcaaggtcaccccgaagggcgaaaccgagctcactgccgaagagcgcctgctgcgcgccatcttcggcgagaaggcccgcgaagtgcgcgacacctccctcaaggtgccccacggctcaggcggacgcgtcatcggcatcaaccgcttctctcgtctcgaaggcgacgagctggcgccgggcgtcaacgagctcgtgcgcatctacgtggctcagaagcgcaagatccagcagggcgacaagctctccggccgccacggaaacaagggcgtcatttcacgcatcctgcccgtcgaagacatgccctaccttgccgacggcacgcccatcgacgtcatcttgaacccgctcggcgttccgtcccgtatgaacgtcggccagctgctcgaatgccatctcggttgggcggcgaagtggggttgggcggatgacgataactccgacgaagttgtcgagggaccgatccacgttgcaacgccggtattcgacggcgcaaccgagaaggaaatctcggatgcgatcctcaaggcgaaccgcaacctcatcaacatcaaccatgccaaatacggcgagcatgcctgcgacgatttcgtgccgcagcttaccgaaaccggcaaggcgtggctctacgacggacgcacgggcgagaagttccgcgagcccatcaccgtcggtcagagctacatcctgaaactcggccacatggtcgacgacaagatccacgcccgttcgaccggcccctacagcctcatcacccagcagccgctcggcggtaaggctcagttcggcggccagcgcttcggcgagatggaagtgtgggcgctttacgcctacggtgcctccaacgtgctccaagagatcctcacggtcaaatccgacgacacgtcgggccgtgtgaaatcctacgaagccatcgtcaagggcgaaaacattccggcggcggaggttcccgagagcttcaaggttctcgtcaaggaaatgaagtcgctgtgcctgaacgtcgagctcgagggcgaagatcaccacgccatcgacatcacgcaagagcacgagaacgagcaggatgcgggagatgccgcgctgcttgcggcgctgcaggccgacgctaagaagaccgaagaagacgacgcggcgtttgcactcgacaacattgccgctgaactgggagatttgatgaaagacgtagcggacggctacagcgatacgaacgacctcatcggtaacggggaggaggaataatgacgacggaattcgacgtaaacaatttcgacgccctgcgcatctccctcgcttccgccgaggacgtgcgcagctggtcgcgcggcgaagtgaagaaacctgagaccatcaactaccgtacgctcaagcccgagaaagacggcttgttctgcgagaagatattcggtcccacgaaagattgggaatgcgcgtgcggcaagtacaagcgcgttcgcttcaagggcatcgtctgcgagcgctgcggcgtcgaggtgacccgctccaaggttcgccgcgagcgcatgggccacatcgagcttgccgctccggtcagccatatctggtatttcaagggatcgccttcgcgtttgggctacctcttggacattccccccaaggagctcgagaaggttctgtacttcgccagctccatcatcacctcggtggataaggaagcgcgcgaggaggacgccgacgagctgcgcgacgagctggcagccgatctcgaagagttggacgccgagcgcgaccgcctcatcgaggcgacccgccgcctgtcgaccgactacgtgccggaagacgacgatttcgtcgacgacgtcgacgaggacgagcgcatgtcccccgaagaggtcgaagaggaaatagccgacatctacgaggagttcaacgagcgcaaggcgctgcgctccgacgcgttcgaggcgttcatgaagatcgagcccaagcagctcgttcccgatgaggcgctctaccgcgagatgcgcatgaactactccgattacttcaagggcggcatgggcgccgaagcggtgcgcgatctgctcgatgccatcgatctggcgaaaaccgccgacgagctgcgcgaagtcatctccaccggcaagggtcagaagcgtgcgaaggccatcaagcgcttgaaggtggtcgatgcgttcttgaagagcgtcaacaagcccaccgacatgatcctcgatgtcatcccggtcattccgcccgatctgcgcccgatggtgcagctcgacggcggccgcttcgcaacgtctgacctgaacgatctgtatcgccgcgtgatcaaccgcaacaaccgtctcaagcgcctgctcgacctcggtgcccccgagatcatcgtgaacaacgagaagcgcatgctgcaggaggccgtggactcgctgttcgacaacggccgtcgcggccgtcccgtcacggggccgggcaaccgcccgctcaaatcgctctccgatatgctcaagggcaagcagggccgcttccgccagaacctgctcggcaagcgcgtcgactactccggccgttcggttatcgtcgtcggtccgcagctgaagctgcaccagtgcggcctgcccagccagatggctctcgagctcttcaagcccttcgttatgaagcgcctggtcgagcttgagtacgccgctaatatcaaggctgcgaagcgcgcggtcgaccgcggcgcgagctacgtgtgggacgtgctcgaggaagtcatcaccgagcatccagtgctccttaaccgcgcacccaccctgcatcgcttgggcatccaggcgttcgaacccgtgctcgtcgagggcaaggccatcaggctccatccgctcgtctgcaccgcgttcaacgccgacttcgatggcgaccagatggctgtgcacgtgccgctcggcaacgaggcgcaggccgaggctcgcgtgctcatgctgtcgtccaacaacatcaaatcgcccgcccacggccgtcctttgaccgttccgacgcaggatatgatcatcggcttgtactacctgaccgctgcccgcgagggcttcgagggcgaaggcaggtcgttcatcgacttcaacgacgccatgaacgcctatgacgctcgcgccgaactcgacctgcaggcaaagatctgggtgcgtctcgaaagggacaccatggtcgcaacctcgtacaacgagttcgaggagcacaaggccggcgagcgcatcgaaaccacgatcggccgcatcacgttcaacaacgttctgcccgatgattatccgtatctcaactacgagatgaacaaaaaggagatcagccgcctcgtcgaggattgctgcaaccgctacgagctttccgagatgccggccatcctcgatggtttgaaggatgcgggcttccactatgcaacgcgcgccggcgtcaccgtttcggtgtacgatgcgaccgtgccgccggagaagggcgatatcctcgccgccgcagatgcgaaggttgatgcgatcgacgaggactacgagatgggcctcatgagccaggaggagcgccacaagcaggtcgttgacatctggaacgaagccaacgaagaggtcggcgaggcgatggccgagaacttcgacaagttcaaccccatctacatgatggcgttctcgggcgctcgaggcaatattaagcagatccgccagcttgcgggcatgcgcggtcttatgtccgacccgaagggcgagatcatcgaccgcccgatcaaggcgaacttccgcgaaggcctgtcggtgctcgaatacttcatctcgacgcacggcgctcgtaagggtctcgccgacacggcgctcagaaccgccgactcggggtatctgacccgccgtctcgtggacgtcgcgcaggatgtcatcatccgcgagatcgattgcggcaccaccgacggcgtgccttatcccatctacaacgagaagggcgatctggacgagaacctcatcggccgctgcctgctcgaagatgcggtcgcgcaggacggatccatgatcgtggccgccggcgaatacgtgacgtccatggcgcagatcaaggcgctcgaggacaacggcatcgaggaagtcaccatccgcacggttatgacttgccatgccgaccagggcgtatgccagaagtgctacggttgggatcttgcgacgtcgcgcccggtcaacatcggcaccgcggtcggcatcatcgccgcccagtcgatcggcgagcccggcacgcagctcaccatgagaacgttccataccggcggcgtcgccggcgaggacatcacccacggccttccccgcgttaccgagcttttcgaagcccgcaaaccgaagggccaggcggtgctcgccgagattgcaggtacgctgcagatctcgggcgacaagcaaaccaagacgatcacgatccacgaccaacagggcaacttccgcgagtacgtggtttccgcccgcgcccagatgcttccgggcgtgctcgacggcagccaggtgaaagtcggccagcagctcaccaagggttccgtgaacccgcacgaccttctgcgcctcaccgatccgaacaccacgctgcgctacatcgtgagccaggttcagggcgtgtacgtgagccagggcgtcgatatcaacgacaagcacatcgaggttatcgcacgtcagatgctgcgcaaggtcgccgtcatcgatgcgggcgaatccgatttcttgccgggtcgccaggtgaaccgtttcgaattcgagaaggttgcaaacaacctcgtgctcgatggcaaagagccgccggttggccagcctttgctgctcggcatcaccaaggcatcccttgcgaccgattctttcctttcggcagcgtcgttccaggagaccaccaaggttctcaccgatgccgccatcgaaggcaagatcgacaaccttgcgggcttgaaggagaacgtcatcatcggcaagcccattccggcgggtacgggtctgccgcgctatcgcaaggtcggcctcacctacaagggtcgcccggtcgatcgcgtgacaagcgatacgctgccggagttcgcccccgaagctttgcgcgatatcgaggatcttctgcctcagccgcaggattggtcgcttgacggcgatagctacctcaacatgggtacgaattacacgaactactacagcggcatgtcgctcgggcatcgcacgcccaacctgaccgacgaggatgcgcgtctctacatctacgacgatctgggcgtgtcgcagcgctgggccaacaagttctccgaagcgggcatcgagacggttgccgatctcgtgggccacacggaagaggatctgctgcgcatcgaaggcatcggcgtgaaggcgatcgaggagctcaaggagggcttggagcagcacgacctgctccatgtcatcgagggcgacctcaccgccacgagcgatgacatgagccagctgctcgacatggtgttcagcccggatgatacgattctcatcggcggcgacgagcccccgacgttcaataccgagggcgaggacatgctcggcgaagcactgccgccgcgttcgtaccagcgcaacctcgaagagctcgatgctctgctcggctctgtaggttcgttcgggttcgggttgtccgagagcgaagacggagacggaaacggctccgacgacgactcgggctccgacgacgaggaataaatcgatcagggggcgcgaacaagcgccccctttcatataaggacgtattccatggttgagaaaaccttcattcccgagggtgtcgagcccccggcatcccagatcggcgcaaccatcgaggcgcttgccggcaccattgcggcgcgccgggaggctggcgcggaaagctatacgcatcgattgctctccgagggcgaagactcggtactgaaaaaggttgcggaggaagcgaccgaggtcgtgctggcggcaaaagacatcgagtgctgcatgctcgtcgcgcaggagtcggccgagtcgtctgctatcgccatggggcaagacgaggatgccgtatgcgcagagcttccggccgaatactacgaagcggtcgatcaccttcgctacgaggcggccgatgtcgtgtaccacctgctcgtcgtactcgagcgctacggaatcggaatcgacgagttcgccgccgagctgaatagccgcatggcggatggggagcgtccttcggggggaatcatgctgcacgacgagtatatccaaagggggaaataatggctcgactgttcggtaccgacggcgttcgcggcatcgcgaacaaggaattgacctgcgagacggctttcaagctcgggcaggccgccgtggcgtttttggggcgcaacatcgttatcgggaaggatacgcgccaaagcggcgatatgctcgagtcttgcgtgatggcgggcatcatgagcatgggcggcacggcgttttgcgcgggcatcgttcccacgccgggcgtggcgctgctcgttcgcgaactgtactgcgatggtggcatcgtgatatcggcgtcccataatcctcccgagtacaacggcatcaaattcttcgacgcacagggttacaaactgccatgcgatctcgaggacgagatcgaggcgtttgtcgtagagggtaaagccgacgggatggagcttccgacgggcggcgcggtaggcgtgtcgattcccatcgaaaacgcggccgagctctacatcgagcatgccgtcgagagcgttgcggaacagggggttcggttcgacggactcaaggtggcgcttgatgtgggccacggcgcctcggctgtctcgagcgccgaagcgctcattcggctcggagccgacgtgcgggtcgtcaacgacgaattcgacggcaccgatatcaacgtgtcgtgcggatcgactcatctggagccgctgcgcgaacttgtggccgagatgggcgccgatgtgggcatcgcccatgacggcgatgccgatcgagtcatgttcgtcgatgcagacggcaccgaaatcgatggcgatgttgtagaggcggtctgtgcgatcgacctggcaaaccgcggccttcttcccggaaacgccgtcgtttcgacggtcatgtgcaatctcggcttcacgcatgccatgcgcggtgcgggcattgaggtcatccagacccaggtgggcgatcgtttcgtgctcgaggccatgcgcgagcgcggcctggcgctcggcggcgagcaaagcggccatatgattttcctcgagcacaattcgacgggcgatggccttgtgactgcgttgcagtttcttgccgcatgccagcgctcgggtggcaccgtggcgcaggctgcggcggttatgcagcggtatccgcaggtgcttttgaacgtgcaggttgccgacaagcatgcgctcgacggcaacgaagccatcgagcgcgccgttgccgatgcttcggccgagcttggcgacgacggccgcattctcgtgcgcccaagcggcaccgagcctgtcgtccgcgtgatggtggaggcttccgaccatgaaacggcccagcgctacgccgatgcggtagccgaggtcgttgcggccgagctgtaacggagccgtaggacctttttgcttcgaatcgatcggcgcccgcggttttccgcaggcgccgatcgcattttccgggcaagggcgccgatcgcgcgtgccgccttttcgcgcaagggctcctttggggctatacgctcggatagagcgcggcgcgcagcagcgaaaagaacgccgtccgatcttcccgacttgctccgaaagcgccgacgatgcttttcaggacaagggagcagagctgttcgacatcgatttccttctcgattcgcgcacggtctatggcagcgtctttctcgtaggcgcgcatgaggccctgccgcatgtgctcgaagctcttcgattcgcgttctttcccctcggcgcgcgcccgcattcccagcgcgtggatttcgggaagccagtccgagcgaaacgacgagagcgcttcatccatggccgaggcagcccgttcggcgaagtcgacgaatccccgattatcgcaatcgggttcgagatcggggctgccatggatcacctcctgccagaatacgccgacaacatcgatgatcaggctgtctttcgagggatagtagttgtagatcgatccgatggagacgccgcatgcggcggcgacgctgcggacgctcacgcttgcgagcccctgttctttggcaaggcgatatgcggtttcaagtatgtccgctgcgtcgatgctgcgatgggatcccatggtttgtcgacaccgttcctctcaatagccgtacgtcgcgcgcgattggttttacgaatgcgattccatgataaaccgagatgcctgcattgcgggcgagacggcacctctaacgcgcaatgcgatgcctgtcatgagggcggcgcaatacgagcagggcggctagggccacgacgacgatcgatccgatacccgcctgaaggttttgaaggtggaggaccgggatgccctgcagcacgccaaggacgtagggcatgagccaaaacagccagacgagtgcgctgaaggtatggaatcttctcatgcccttctcatttttccgagcgaaagtgacggttgcccagatggcatggacggccatgagggcgatggcgagaacccccgaggccgcgtgcatgccgagtgcggttccgccgtcctgggccatgacggtcatcagggtagtgccggtcgtatcgagggcgagaccgatccagaagagggataggttgcccttggtgagcgcgcctcgcttccgttcgctgaacactccggcggtgtaacaaacgagggcgagcgatatggcggtcgttgccgcaacgagcgtgatatccattgcagatcctttcgctagattatgaacaccgttcattaaatgaacaacgttcataatagggtgcgccgaatcgaagtcaagcaaaagtgaacaatgttcataattagattgtcaatctgttgccgttggggcgtataggggaacggggctctggttcgcaaggaacccgagccccgttttttgatgggtcgcagcgccgatggggcgatgcgacggatgccgatgaggtcgttccgaatcgcgtcggccggaatgcgaagtcaggtcgagccatcggcgcccattgccaggatggcgatgcaaaatgggcttttacttccccaagccaagcaggcgcgaaatcaggccgcgtttcttcggcttgccgccctcgacgaacacgatgcccgcaggggagatctcgatcgcttcgctttgcgtcttcgccctcggatgatcgggctgtcgctcgtcgattgcaggcgcttcggagccgcctgcgaaagcgccgttcggtgcatcctcggagcggtcggcgcaatcgccctgcgcggcatcctcgcgctcgtcggaccgagcagccggcgccggtgcgtttgcggctgcggcggccttttcggctttcgcgcgattcgcgtcgcgtacggcggtttccgcagcggcggcgagcttgcgcgccttcgcatcttcgatgaagtactcctgcgaatcgaacagctctttttcgccgttctcgtcggcgggcgcgaagaatccgaggggcgtgtagctcttgtcgggcaaaagctcgcggagcttcgccgtgtctttgagcgaaacgtcgatgtaatcggtgatctcgcgccgcaggctttcgccgagcaccggccaggcgatctcgatgcgtttttccatattgcgggtcatgagatcggcgctcgagagatagaggtccatcgcatcgtgcggtccgaacccgtagatgcggctgtgctcgagcagcctgcccacgatcgaaaccacccgcacgttgtcggtgtagccttcgattccgggaacgatgcacgagattccgcgcacgagcagcgtgacgggcacgcccgcctgcgacgcctcggctatcttctcgatgatgtccttgtcggtgatcgagttggttttgaagaacaagccgctcggctcgcctgcctgcgcccgttcgatctcgcggtcgatgcgggcgatgatcatcggcttgatctgcaacggggcgacccagaggatgtcgtagttgttcgatgcgttctcaagacccatgttgcggaagaattcagtcgcatcccgcccgatcgtctcatcggcggtgatgaacgagagatcggtgtagagcttggcggtcttctcgttgtagttgccggtgccgagctgcgtgatgtgctgcacgccgcgttccgtctgcctcgtgatgcagcagatcttcgaatgcaccttgaaatcgcggaacccgtagatgacgttcgcccccgcctgctcgaagcgctgcgaccacgctatgttgttgctctcgtcgaatcgcgcgcgaagctcgaacagcgcggtgacttccttgccgttctcggcggcggcgatgagcgcttcggccaggtgcgattggctggccaggcggtacagcgtgattttgatcgagatgaccgacgggtcggtcgatgcctcgcgcaaaagctgcacgaacgcgtccatactttcgtaagggtaggaaagcagcgtttccgcttcggcaacctgttcgatgatggggcggttgcggtcgaggtcggcgggccactggggcgagaacggctggttgacgagtttggcggcgagcttggcgtcgatacggccggcgagtccgaacgtgtagctcatatcgagcgggcagcttgtggcgaacacctgatggggtttgagatcgaggcgctcgagcaggaagtcggataccgtcttcgagagcttccgttcgctttcgagccggacgggagccaggtgcgagcgctttttgagaatgcgtttcatgtgctcgcggtaatcctcgtcgttctcgtcggtgccctcggtcgaatcgaggtcggcgttgcgcgtgacgcagatcacattggtgtgcttgacggtgtacatcgagaacacgtcggcggcgatgaactcgagcgcgtcttctatgaggatgaacgggaagccttcgccgggaagctggatgacgcgctcgcactgtcgaggcatggggatgatgccgagcgtcacgccttctgcggcaaggttttttgccttcttggcctgcttcgcggtcgccttgccgaccttgtcttccttttcgatgcggtcgtttttctcggctccgtcggcggcgtctttcttcttgtcggcggcggcttcgtcaaggcggacgacaacgtaaagcgcgccgttttccaggtgggggaacgggtggcgcgagttgacgatctggggcgagagaaacggcatcacgttgagttcgaggtagcggcgcagaaacgcgcgctgctcctcgtcgagcgacgcctcggtgaggtggcggatgcccgcttcggcaagttggtcgcgtacctgggcgaacgtctgctcttggatggggtagagctcgtggcagcgttcgtagatggcatcgagctgttcggagggcgtcatgttggttttgctgtcgatgatgcgttttttcacaagcgaaaggtcggtcaggctgccgacgcgcaccatgaagaactcctggagattgctccagaagatcgagacgaagttgagccgttcgagcaggggcacggtgggatcggctccctggtcgagaacgcgctggttgaatgtgagccacgagagttcccggttctgcatgaacggactcgcgggaacgggaacgtgatcgccgccttcgggggagatgctgctttccgaaagcatttcggcgacggtgtttccgtctccgagcgagctgacggtgcgcatgtttgcgtcgagtggatccatggttacctcccgtgcttatcggtgccttttcttgcctgatcggagccggtgttgccggcaccgtttcgggcgctgtgcgattcgccgcccgttccggttcgcttgccttcgcggccgaaatcgcttctgccgcgaagcatgcgctcgatcaggtagccctctcgaacgcctttcttgcatatgacaagcgagcttgccccggtatcgcgcaggagccggcggatgatcaggcaccccggaacgagcgtatggatgcggtcgggcgcggctttgagggcggtgtgggcgaaggcgtcggggtcggcgaggcacgatccgatgatggcgtcgaggtcttcgggcgtcagccgctcggggcgcaccccttgaccgtaggattccgcgtacatcttcgcggcggcgcgcacgcttcctccgatgccgtagagcgtatcgcagcgataacggctcgcgtcgatggaccccagccgatcctcgagcgcgtcctcgatcgcccgggcctcgtcttgggtcggcagaatgccgcgcacgtgcgcggcgaacgacgagagcgacccctgtccgatgcttacgttgtcatggtcggcgcctcgggcaatgcgggtgagctcggtcgagccgcccccgatgtcgatgagcgtgcccccctcgatagcccggtcgcacgtggcgcccacgaatccgaggtgggcttcgtcttctgcggacaaaagcgtgatggaaaaaccgctgcccttttcgatggcgcgcacggcggcagacgagttctcgcagttgcgcagcacggcggtggcgaacacgtcggttcttttgcagtcgaaatacttgaggcgtttggcgtggcctgcgagcacgtcgagtgcgtggtcgatgcccttatcggtgaacgagccgtccgcaacgtgggccgagaggcccgccatcactttgttgttgagcagcgttcggaaatctttgcgggtgtaggagcgcttcgagtcgtccttgacttcgtagacgcataggcggatcgtgttcgatcccaggtcgatgactccgtaattcggcatggacgctcctcgttttctttgctgcccgctaccgttattgtagcgttcccgcaggatgcgaagcgggatgtatacgcagcgttaccgcgattttactctgtgctatgatgaaccgacgcgccggggcgaagcggccccggccgtgccgaaggcgcgcatgccgataggccgtgccgccgcggtgcggggcgaaacgatacggaggaagccatgctggagacggtcgagctcggattggacaagctttcgaaggcggattacaaacccatctacgacggtttggtggagcggctcgtggttcttcagcaggaggcgcgagcgaagggcgtcgggctcgtggtgctgttcgagggctggaacggcgcggggaagggcagccgcatctccgatctgctctacaatctcgacgcccgagccacctcggtgtacgtgacccccgatatcgatacgcaagaggctcgcatgttcgccgacatgcacgagggcgtgacggggtactacccgctcatgcagcagttttggaaagcgctcggcccgcgcggcgatatgacgttttacgatcgcgggtggtataccgcggcgttacagcacatgctttacatcgagtccggcgaagcgcccgacgagatgacggccgccaagctcgagaaggggcgcgcttcggtcgcggcggacgagcacgtcgcctcgatcgagagcttcgagcgccagcttgtcgatgacggctacgtggtcgtgaagttcttcctccatgtatcccagcaggcgcagcgaaagcgacttgccaagctgcatggcgatccggcgacgagctggcgcgtgagcaaggcgaagctcaagagcgccgaaaactacaagcgggcctacaagctctacgatcgcctgctttcgggcagcgatttctcgtttgcgccatggaccctgatcagcggggaggacaagcggcgcgccaatcttgacatcgcggctacgctcgtcagcgcattcgaagtggcgcttgcgcgcggcgacgacccggacgctgccgccgcggcagaacgggcgcgggccaactctgccgggatccttcgagaaggcgatccgcgcgctcgaagcgccgcagatcgacaggctatcctcgaggcggccgggcgcgaagcggatgcctcgtcgcggcttgccccgcgcgcatcgcgcttcgagatcgccgaaggcgttccccgtcttgccgaagtggatcactcccttgtgctcggcgaaggcgattaccgccgccgcctcaagtacgagcagaaacgccttgccatgcttgagcaggagatgtatctggcacgcgtccctctcatggtgatgtacgaaggatgggatgctgcggggaagggcggtgccatcaagcgggtcgcccaggctctcgacgcccgcgcctacaccatcttcacgagccctgcacccaccaagcccgagttggcccatcctcatctgtggagatattggacgcggctgccgaaggcggggcacgtgggcatctacgatcgcagctggtacgggcgggtgttggtcgagcgagtcgaaggtttcgcctcggcaacggaatggtcacgcgcctatgacgaaataaacgagttcgagcgcgagttgcagaaatggggggccatcctcatcaaattctgggtcgatgtctgccccgatgagcagctctcccggttcgaggcccgcgaggcggatcctgcgaagcaatggaagatcaccgaggaggattggcgcaaccgcgaaaagtatccgcagtacaaagcggctgtcgaggatatgttccgcctgacgtcgactccgtacgcgccgtggcgcatactcgagagcgatgataagcgctacgctcgcgtgaagtctcttcagatcattaacgatgcgttaacagagcgcttgcgcgaaaactgatgccgcgttactattgtcgctgtattatttaacgacgcgcctggcactgaaggcggtgcttgagcaaaggggtataaagcatggaaactttcttcggaaccattccgatcgaggccgtttgggtcatcgtggcaattatcgttctcatcatcgtcatcttcattgcaaagggtttcttcgacgagatgaagaagtaacgcatgcggccatcggccgtggatattacgtacagaaccgcatgtgcgccctcatcgcgggggcgctttgcttattatgaagttgaactgagataaggggagcgttggcgcggcatcgatgcgcaacgctttcttgttttacatgagctgctaccgaaaggtcattatggctgacaaccggcacaatcaagacgcatccccccgggcgcgccatgcccagcctgacgcgaactccggaatgccgcgcgatgcgtatccccaagcttcgtcccgccaaccccaatcccgccccggcgcgcagggcggacagcctcgcgccggggcttcgggccagcagccttccgtagatgcgcagggccggcagcaggcgcgaagcgcttcgtcgcgccccagcgtgcagcggcaggcgcagggccgcaggccgggccagcagggttatgcgccggcgcagggcggggcgcgctacgggcgcgatatggtcggcaaacagaagaagaagggcggcccgtggcgggtcgtcttctggatcgccctcgttgttttcatcggggcccttatcgcactcggcgtaatcgccttcagctattggcaggggcaggacaagtacagctccatcgccaccgaagcgttcgaggaacccgcggacatcgaggccaccgcgctttccgatgtcgtcatcgattgggatgcgctcaaggccatcaaccccgatacggtgggttgggtttacgtgcccggcacgatggtcaactatccgatcgtccataccgataacaacgacaagtacctcaagaccgattttctcggggagacgaactggcttgcctcgtacggcgccatcttccttgccgccgagaatgcggctgatttttccgacgcgaacaacatcgtgtacggccaccacatgaacgacggctcgatgttcgcccagttcgccgattttcgcgacgagggcacgttcaacgaacatcgcaccgtctacatcttcacgcccgagcgcaactacaagctggccacgttctcgctcgtggtggtggatgcgagcgacccgcttgcccagccgagtttcgccgatgccgaagagctgcaatcctacgttcaggacaagatggaccgcagcacggtcacgcccgatcccgccacggtggcggccgacggcgtcgagaagatgttcgcgttcgtcacctgcgccgattactcggcgaccaacgatcgcatcgtgctgttcgcaaacgttgccgacagcgcggtccccgcgaacgcgagcacacccgaagacgatgcgggcggatcgatcgatcccgaagatgcggcagctgccgaagacgccgcgggagacgtcgcatgagccagtctgcgtttcccggggaaaggcccgatcgacctgaagaggaatgcgccgttttcggcgtgtacgcgaagggcgaagacgttgcccgcatggcgtgcttcggcttgcaggccctgcagcatcgcgggcaggaaagcgcgggcatcgccgtcggcgatggcgagaccatcacggttgcaaaggatctcgggcttgtgacgcaggtgttcgacgaatcgaccctcgccgctctcgacgggttcgtggccgtggggcatgcccgctattcgacaagcgggggagcggcctcgtgggaagccgcgcagccgcacatttccgccatcgacgacgtgcttatcgcgcttgcccacaacggcacgctcgtcaacaccaacgccatccgcacgagcctcataagcgagggcgtgcaattccgctcgcataccgacagcgaggtggccgcgaaggccatcggctacgtcacccagcagacccatcacctgagaaacggcatccgccatgcgatggaaacgctcgagggcgcctatgctatggtgctcgcaagccccgattcgctctatgcgtttcgcgacccgaacggcatccggccgctgtgcgtcgggaggcttcccgacgatcgcgggtgggtcgtgtcaagcgaaacctgcggccttgatatcgtgggagcagaatacgtgcgcgatgtggagccgggcgagatcgtgcgtttcaacgacgagggaatgcattccgagcagggggttgccccccgcaggcgtgccgcctgcattttcgagtatgtgtatttcgcgcgacccgacagcgttctcgacggcatgagcgtgtaccaggctcgccgcaacatggggcgcgttatcgctcgggaatcacccgtcgaagccgatctcgtgctcggcgtgcccgattcgggcgtgccctccgcgatgggctacgcagccgagagcggcattccgtacgccgatggcatcgtgaagaaccgctatgtcggacgcacgttcatccaaccgactcaggccatgcgccagctcggcatccgtttgaagctcaatccgctgccgtcggttatcgcaggcaagcggctcgtcgtgatcgacgacagcatcgtgcgcggcaatacgtcaaaaaagctcgtggacatgctgcgcgaagcgggagctgccgaagtgcatctgcgcatcgtgagtcccgaggttttatggccgtgcttttacggcatcgacaccgattcgcgcgaccagctgatcgccgccaacatgaccaacgccgaaatgtgcgagttcatcggtgccgattcgcttgccttcatcacgctcgaaggcctgcgcgattcgatccgggcgaaccacgaaggtttctgcgaagcgtgcttcacgggcgaatatcctgtggacattccagagtccatcagcaagaatagttttctgaccaaagccgattttgcggaagcgtcgggattgcagtaaatgccatgcgcctgggcagcgggcgaggtttttcgtacaaggagatgagatgacagagagaatcaccgtaagcgccgtcgaaagggacgatgcgcccgccatgccgagctgggcacagggtgcgacgacctacgctcaggccggggttgacaccgccgaaggggctcgtgcggtcgacgccatcaaaggcgccgtccatgaaacctaccgtgacgaggtgatcggcgacatcggcggattcggcggcttgttctcgattgctgcggccaaaaacatggccgatcccatcctcgtttccggcaccgacggggtaggtacgaagctcaaggtggcgcagcttgcaaacaagcacgatacggtgggaatcgatcttgtggccatgtgtgccaacgatatcctcgcaaccggcgcggagcccctgttcttcctcgactacgtcgccatcggcaagcttcgcgccgaagcggtcgccgaggttgtttcgggcattgcagaaggatgcaagcaggcgggctgcgcgctcatcggcggcgagatggcggagcaccccggtgtcatggatcctgatgattacgacctttcgggcttctgcgtaggggtggtcgaccgccccgagatgctcgatcccaagcgcgtgcaggtaggagacgtgcttgtcggcctcgcttcgagcggcctccactctaacggttactcgcttgcccgcaaggtgtgcgtggagggaaagacccactacgagctgcgcctcgagcgcgaggaactcggcggcttgagcgtggaggaggcgttgctcgccccgacgcgcatctacgtgaagcaggtgctttcggtgctgaggaagcatcccaaggcggttcgcgcccttgcgcacatcacgggcggcggcatttcggaaaaccttgatcgcgcgcttcccgatacggtcgatgcagaggtggagctgggaacttgggatgttcctccgatcgcgacattcgtgtgcaacgccgccaagctcgatgagaccgaggcgctcaaaacgttcaacatggggctcggcatggtgctcatcgtcgatccggcgaaagtcggcatcgtcgaggaggcgctcgccgcagccggcgagaagacctaccgcgtcggtcgcatcgtcgaaggcgagggcaaggtcgtctatgcgaacgaaggctgcctgttcgcctcgaacgacgccgaagagcctgaggcggattagggcaaaggcattgcggtctcgccgaatcgacagctggcgcatggcgcggaaaaccgcttttcggcccttgcgcgcgctgccttcgcccgaaggtccgatgaagcgcatcgggtcggtgtactatggaagttgacggaaggggtgcgaaattgaccggtaagctcaaaataggcgtattgctcagcggcagcggcacgaacctcgctgcgatcatcgatgcgatcgaagaagggagcctgaacgccgaaatcgtcgaagtcatctcgtcgagacccgaggcgtacggcctcgtgcgcgccaaggagcacggcatccccacctgctcgctcaacaaggacatctacgccgacccggctacggcgaacgagatcatagccgccgaactcaagcgggcgggtgccgagtacgtggtcatggccggctacatgcgcaagctgactgaggaggttctgcttgcctatcccgataaggttttgaacctgcatccggcattgctgccctcgttcaagggagcccatgccatcgaggacgctttcaacgccggcgtcaaggtgacgggcatcaccgtgcacttcgccaacgccgagtacgacaaggggccgatcatcgcccagcgcgccgttgcggtccgcgaagacgatacgcttgaaacgcttgaggctcgcatccatgaagcggagcacgagctgtatcccgaggtgctgcgctggcttgccgccgggcgcgtctcgataaccgaagagaggaaggtgcgcatcagtgaatagggaaacgctgaccaggatcatcggggacctcaccgagggcttgacgcccgagcttacagccgaggacttcccgtgcttctcggccgaggcgaccgagggcaacgagcacgtttcgcccgattatctcgacgtcatcgcgagaagcctggacaaatcagacatcgccacgttcgagcgggcggctaaggcgatggacgacggtgatctggcctggatcggcttcaagatcgtctacgatcccgaggccgccatgtccaacaccgataacgaggtgacgaagaagtacggcgacgagggctcggccgacggcgagccgctcgtgttcttctgcaacgatgcgaaagagtgcgtcgcctcgcgcccgtattcgccgcgcgatttcttccaaatgaaggacgtgactcgcggtccctcgatgcacaacgagcagttcgagggcctcacgtgggcaagtgtgcccctgtttgattcggttcgcgtgtggctgcttggggcaagcgacgcttcgagcgaggttgccgcgctcgctcatcatgtcggcttcgatgtgacggttgtggattacgaccccgcatatgtgaacgagagccgtttccccgatgcccatcgcatcgttctttcgggtttcgacgagctcgacaagatcaaagcagatgattccgattacgtgtgcgtgctcacgcgcgggcatatgttcgaccccgagggctgcgtttgggcgcttgcgaacaacgtgcattacgtggggatgatgggatgcgccggcaagaacgagcgcgtgtacgaactggttcgcgaagcggggatgaccgacgcggattgggagcgcgtgaagcggccgataggtttgaaattcggtgcgaagacacccgccgagctggctatatccattgtggccgagcttgtggacgtcaggtaccggcaacgttacagcgaagaggcccgtgcgaagcacgaagccagtttgggaaggagctaaggtgaaagatccgaaggtcaagcgagtgctcatctcggttaccgataagagcggggtggttcagttcgcgtcggcgctcgcaaccgagttcggcgcagagatcatttcgactggcggcacagcgcgcgtgcttgccgaggcgggcgtgcctgtaacgcccatcgacgacgtgaccgagtttcccgagatgatggacggccgcgtgaagacgctgcacccgaaggtgcacggaggtctgctcgccaagcgcgataacgccgatcacatggcccaggctgccgaacacggcatcgagatgatcgacatggtggtcgtgaacctttacgcgttcaccaaaacggtcgactcgggcgccgatttcgatacgtgcatcgaaaacatcgacatcggcggcccctccatgctccgctctgctgcgaagaacttcgaatcggtcgccgtggtgacgcgccccgatatgtacgacgagattctcgatgagatgcgcgcgaacggcggtgccaccaagcgcagcacccgtctttcgcttgcgttgcaggtgttcgagaccacgaatgcctatgacggctccatcgccgcatggctggcccaacagatcgcgggggatgccgatgccgagtttcccgctcgcatcgatttggctctttcgaaggttcaggatttgcgctacggcgaaaacccgcaccagaatgccgcgttctaccgtcgcgacgcctacaagatggccgatcatagcctcgcgaacgcccgccagcttcagggcaaggagctttcgtacaacaactacctcgatctcgatgcggcgtgggctgcggtgcgcgagttcgatgagcctgcgtgcgtgatcgtcaagcacctcacgccgtgcggcgtgtgcgtggacgacgatatcgtcgcggcgtacaagaaagcgcatgagtgcgatcctgtctccgcatacggcggggtcatggccttcaaccgccccgtcacctccgacatcgtggttgcgatcttcgaaaacaagcagttcgttgaagccatcatcgcccccgagttcgcaggcgatgcgcttgccatgtacgaatcgaagcccaacgcgcgcctgctcgccacgggtggcgtgaatcctgcgggcaaagaggtcgagttccgctcggttgagggcggcctgctttgccaggactccgatgcggttgccgaagacccggcggcgttcacggttgccaccaagcgccagcccaccgaagccgagatggaggagcttgttttcgcctggaaggtgtgcaaatcggtcaagagcaacgcgattctcatcgcgaagggccatgcgaccgtcggcgtgggcggcggacagccgaatcgcgtgaattccgctcggatcgccgtcgagcaggcgggcgagaaggctgtcggggccgtagccgcttccgatgcgttcttcccgttccgcgatggcctcgacgctttggcggaggccggcgtcacggcggtcatccaaccgggcggctcgatccgcgacgaagaggtcgtggctgctgccgatgagcacggaatcgccatggtgttcacggggcaccgccacttccgtcactaagccgcgccgcacgcgggcgcgcgatgggcggccgcgtgcgcgaaggcgcgcagatacgcgaaggcatgcaaacggagttttaaagcgggtgcgaacgaattggttcgcacccgcttttgcgtgagggtctgagcgtgcgggcatctttgggcagtgggtgacacggcttcattgcaatctggctgaaaaatccactttgggcaacgataatcgcaataatcagcgatttgcgattgcgattcacagcaaacgcgcaggtcgcgcaaagacaggctgccggtttgattgcccaaagtggatttttcagccagatttgcaccttgctctgccatcttccggcgcagtgacgctcgggtgcccttgtcgccctgccgagccgccccgtcgccccgccgcgctgttcctgtcgcggtttcgcaacggctcgatgactgttgcgcccgctcgcttgaacagccgaacggccaaccatacactcgaagcatggaaaagagtgcgcacaagaatacggagcggctccatgctctgtggacgcgtttggcggcgtgggtcaagcgcccctatacgaacctgtaccgcatcgctttgccgatgctcttcttcggcggcctgtgcctcgcgcttcctccttgggtcggactcgtcctgttcgcgccgcttgccgtcatcctcgggttcaaaacggctttcgcaatcaaaagcatcgtgtcgctcgatctggtgagcttgatcgacgacgcgggcgtgccctgcctcgacacgcgggaagatcggctgcagcgtgcgtgggccctcggttgcgcgggcatcgccgtcgccgtttccctcgcgcttgttttgcgcgcggtgttcggaacgtttccccagattgaaattcccgaagccgtgctcacgtacatttcctttacagcggttctgatcagcgggttcatcctgttctactttctggcgctgcgcttcgacaaatcggttctgcgcggtttgacgagcatcacggttacactgcccgcctttttcatcgtggtcgtggtggcgagcatccttttgtcgtgggccatgcgggcgttggcggcgttcgggatatcggccgaaggcatgttgcaagacggattcgattggctctacgaggtgcagcgcatcctcggaatggcaaccgattatttcctcaagcaggattcgatcatcatagccgcctccattgtgctcgcggcgctcctgcttctgctctacacctattcggttccgtactactggatgagaagcgtgtcgcggtggctcaaaggcatcagcctcgtggcggcggcgttcggcgctgcggtcatcgtttttgcgggcgtgtggcttgccgatgtgcagcagttcgcggccgaaagcgcatcggggcagctcgcttcggcaatcgattcgagcgtgctcgacagccaggcgagctctctttcccagtacaaatcagatgacctcatcgcgctcatcaaggcgttcgtcctgccctacaccgtgggcgtgttcgttgcgaatgcggtggtggcgctgcgcaaggggaaggcgaaaacggtttcggacggtatcatcgatcggttcgctgccgacggatcggttgacgaagacgagcttccagccttgaagaagcgctatctgtactacggggggagccagacgctgtgggacatcgcgctgcgctcgatcggccacgatattccgctgccgtatccgtttgcgccgcgcaagctttcgatcaaggagcgcatcaccggcgagttggaagatccgccgcccgcgcatccgcacgatgatgaggctaaggatgccgagacgcgctcctagcccgtgcgttgtaggacctatgtcgcgcgcgtgtagatttcctacataacggcaacgggacctcggtttgcgcgtcgctattgcgatgccgatgcgtatagtggacgcatgaagaaatcagaagcactgcgaattctcggtcttcaagatggggcgaccgacgatgagataaagaaagcccatcgtgcaaaggtgatcgagcatcaccccgataagtacgcccaagatcccgagaagcacgcttgggccgaagagcagaccaagcgcatcaacgaggcgcgcgatgtgctcatctcgcgcaagtgggagcccgaatacgggcgaggcccgtatgcgaacccctacaatccctacggaaacccctacggcgcaagtccctctcgcggccaaggcggccaaggcacccccggttcgtcgaatccttacggcgatccgttttcggggtggccgttcggcggcgggcagggtcagtccacgtgggtatggacctcgtgggacggtgctgcgcaagccggaaaccccttcgatccgttcggcgcgacgcaaccaaggaaaacccctgccgaacagaaagccgatgcggaaaaagacctgcgtaccgaaatcggcgtcatcgccatcaaactcgtgtgccttgccgttctgagcgtgttcgcctcggtcgcctcgggtttgttcctctacgtggcagcatcgatcatctacgggctttggaaacgcctcggcagctgccttatcgccttcttcttcccgattgcgcttgtcggcgcaccgtttctcatgctcatcgcgccccgcgcgggagcggtgacgttcggccttgcgatcttcttcgcgttggcggtgctgttcgacatcgtgaacatgcgaaatgccgtcggcgtctaccttgcggcaaggaaagcggcttcgtctgcgaaatagctcgaacggcgaacgggcggaagggcttgtgcagccggtctgtttgcgccccagcttcgatgcgctcggttgggcgacgtgcgttttgggcatccgtagacgggcggctgtgcgcatacgggccttcgcgagccttccgtgccgcgcgaatcgcgcgatgattgctataatgtgactttcgttcaattgcaggaaaggatacctggtgaagaaggcgttgctgctcgtcttgggcattgtgacctgctgcgtgctcatagcaaacgccgattacctcgccgaattcgttcgcacccttcaaacgggcgcccttctgcccatcgccgtctcgatcgcgcttatgctcgggcgccatatcgtgcaggcgctctcctacgatgcggcgttcgcggcagtggatttcaaaacggggctttggcacaatatcgtgctcatcttctcgcttgtgttcatcaacacgttctgccttttctcgggagctaccggcgtggcgttcatcatcgacgatgctcaccgcaagggggccgatgcgggcacggccacaagcggggcgatcctctcgcagatcggctatttcgccgccgtcctcgtaatttcggtcatcgggttcgtcaccatgctcgtttcggggacgatgaacacgcttttcctgataggcgggcttttgcttgcgggcgtgctcctcatcctttccagtttgttcgtggtcgggtaccgcaagccgcgcgtgctgttccgcgtgtttctgattgccgaaaaagccgtcaacgccgtgctcggcatcatcaagaagcgcatggcggcaggatggggcaggcgcaccgcgagctctttcatcgattccgcgggcattctcgcccataacccggtcgggacgcttatcacggttgggtacgcgtcgctttcggccgttctcaacatggcctgcctcgtggctatcggctacgcgttcggcttcgagaacgtctcggcgcttgtggcggcgttcgcggttgcggcgatttcggtgattttgagtccgaccccgcagggagtcggcgtcgtggaggcggccatcgcggccatcctcacggcgcacgggtgctcgcttgccacggcgaccgccatcgcgctcgtgtaccggggcattatgttttggatcccgttctgcatcggggcggttctcctttcccaatcggggtttttcgcagggaagaagaatgccaccgaagaacagcgggcgaaggacatcggttggatttcaggcacgctcgtgggtatcgtggggctggtgaacatcgggctctcgcttattccgaaatcgttcgagccctacatcgccttgaccgaatggatcgacatcggcacgtttctgaccgggccttttctgatcggcggcagcatcgtgctgcttgtcttggccgtggggctcgtgctgcgctttcgcacggcgtgggcgctttgcgtgacgttgctgatcttgatcgcgggcggcgaattccttttcgtcgacaccgccaaggtagccattgccatcgtcgtgctcgttttgtggctgttctggaagcgcgcggcgttcgatcggcccttgagcctgccgaagcgccgagggccgcatgccgatggcgggggagctactcgtgcgagccgttttgccgctcgcccgcagcgcggcgacgcgccttgcgaggggtgcccgaaagacgaaccggaaccctcgtggcaggaaaaagccgaggtcggggcgaacatccgtcagcaagctcacgacgagggctctctggcgaccgcgtccgacaaggcggcggtgcagccgatgaggaaggcctctgccgagcgccgtgctgcgaggcgggagaggcttgggcgggaaaaggacgatgcccgaagcgagacggccgatcttgacccgcacgccgcccgtgataggatggcgggacgggcccgcgagccgattttcggccaagcacagcgaaacgaaagaacgaagcagctgaagcgccggtcgcgcgacgctgcgccgacgaagcgcccgaagcaacgctcgggcgatgacaaggaggacacccgatgatagtgctcgaagaaccgtttgtctcggaaaccctgatcgaatggctggtgtcatcgaagcatccggttctcgacaacgcgatggcgcgccgaatcgccgccgcccacgacattgcgctctgccccgaaagcgaggccgtcgatcgcatcgaagcgggcgagcggctctacacgagttcggaaaacgcgcttgtttgggtttcctcccatgtgaaggcgccgggtatcgtgcgtcccatagaggtgttcaaagacaaggccctcatgcgcacggtgcttgctcccctcgatcctgatttcttcttcatgtcctgttcggccgacgagctttccgcgctcgacttcgccgaactcaagcctccgttcgtgctcaagccgtcggtcggcttctgcagcgtcggcgtgtatcctattgcggatgagggggattggacggccgccctcgccgatatcgagagcaacgccgcaacgtggcgcgacatgtatcccgaaagcgtgatcggcgcaagcgagttcgtgctcgagggctacatcgagggcaccgagtacgccatcgatgcgtattacgacgccgaggggaagacccatgtactcaacgtcctgcgtcacgatttcgcgaatgcagccgatacgagcgatcgcgcatactgcacgagcgtcgccatcgtgtccgagatggcccctgtgttcacggcatggctcgaccgcgtgaacgagtacgtgggcgctcgaaacttccccgtccatgtcgaagtgcgcgtgcgagacggagtcgtgcgccccatcgagatcaacccgcttcgtttcgccggcctcggcggaaccgatatcagctggttcgcgtacgggttcaggacctacgagcattatctggaaggcaagacccccgattgggaaagcctggctgcgggcaggcagggcaagctttacgtgatgtcgatgctcaacggctgcccgcccgatctgaccggcgacgaatcgttcgattacgaggcgttttgcgcgcggttcgcccgggttctcgccctgcggaagatggactatcggaaaacggcgagcttcgggttcctgttcttcgaaaccgatgaggacgatccgaccgaattgacgtttctcatgaacaccgatttcagggaattcataaccgaatagccttctcgcccatcctctggttgtaccgtgcgcggtccaatcgaaggtttgccgatctttgcccggattgtctctcatatagtctacaatgaagctcatatataattgagttgataatagattagccgaacgaagggcgatgaaactgtgcttcgcttcggtagacaggggggtatgtcctatgcgaatcggtatgaggacgttcgtcgccgcagcgctttcggcgctgcttgctcttacgggttgctcgtcggcgcaggagcccgcttcggagcagcagctcgatccggcgaatcctgtgcagatcgaggtgtggacctactatgccggccaccagcaacaggcgttcgaagatctcgttgcggaattcaacgcgacgaagggcaaggaagcgggcgtttccgttacccatgccagccaaggaggcgtcaacgacctggccgccgcggtgactgcttccgccgaagagcttgtcggatcggcgccgatgcccgacatcttcctcacctattcggatacggcgttcgtcatcgacgggatgggcaaggtcgccgaccttgatccgtatttcacggccgaggaaaaaggcgcgttcatcgacagctttcttgccgaaggggatttcgcaggcgacggcggcctgaaggtgctgcccatcagcaaggcgaccgaaaccattcagatcaacatgaccgattgggaaacgtttgcccgagaaaccggctcgtcgctcgaagaattcgaaaccatcgaggggattacggcgcttgcgcagcgctattacgagtggaccgatgcccagacgcccgaggccgatgacggcaagccgttcttcggtcgcgattccattgcgaactaccttctgaccggctccaagcagctcggccatgagatattcgccgtgaaggacggtgtctgcacgcccgatatcgacaagaacaccatgcgggcgctatgggacaactattacgttccgttcgtcaacggttatttttccgccgagggccgctatcgctccgatgccatcaagaccggtgatctcatctgctacatcggctcctcttcatcggttgtgtacttcccggccgaggttaccgtcgacgatcagacgagctatcccatcgagttcggcgcccttgaggccccgcgcttcgcggggggcgtttcgtgcgcgccgcagcaaggggcggggttcgcggttgcgaaaagcgacgagcgcaccgagctcgcatgcgtcgagtttctcaaatggctaaccgaaaaggagcagaacacgagcttttccatcgaggccggctacattccggtgaccaaggaggcctgcacgtacgagaacatcgaagcggttgcaagcgagacggggaatacgcacgacaactacctcgtcaacctcgaggcgacgcttgagaccgtctcggatggcgtgtacgcgaacgctcccttcgaggggggcgtcgaagcgcgcgtcgtccttgagaaatcgatggccgacaaagctgccgcggatcgcgatcaggtggttgccgccatcgaatcgggggagagccgccgggatgcggtagcgcgattcgacaccgacgagaacttcgaagcgtggttggagagttttaccgctgatttgacagcggctatcggcgcatagcggcaagcgcccctcggaccgagtgaagcatcgcatgaacaggcagaggcaacggcagcggagctcatcggagaaaacgagggcttcgcagagaagaggcatccccttccggatgcttgtggtcgcgccgctcgtcgtcgccctcgtgctgcaggcgttcgtctgctatttcgtcatcttgcgcagcgatagcctgaccatgctcgaggaagatacgtacggcctgctttcggagcgcgtgagcagtcgcgcgggctatcttgaaaacgatatggtgctcaggtggtccgagacgggcgagactgcgcagaagctctcggaaaccgtttcgtccgttcttgccgagcacggggcgtcggccgccgatatcgagacggcttcgcctttggctctcgagatcatcgacagcgccgccgacgatgtgctttctttcgtcaggcgctcggaaatcgacggagcatacttcatcctcatcgatggctcgcaggatgggctgtctggcgaagggccgcgccgcagcgccctctacgtgctcgattcgaaccccgatgtcacccttgagaacgattcggatcttctgctcgcggcttgcccgatcagcttggcgaagagaaccgacatcgcgcttgccagctcatgggaggcgacgctgaccatgggcgcgaatccggacgagacggcctactacgaaaagccgcttgccgccgccctcgaacacccggatgccgcagtcgatgatctgggctattggggtttgcccgtcgatatcggatccacgggaagccgttcgattacctacagcatgccggtgaaggacgaaggcgggcatgtggtcggcgtgttcggcatcgaggtgagcgtgaatcggctcgttacgtttttcccgtaccgcgatctcgacgaagcaggccagggttcctacattctggcgatcggcgatgaatcttcaagcggtttggctggctctgcggtttcgggagaccggttttccctcggcgtcatcgcgtcgacgggcgccgtgcagaatctttacacagacagcaattcgctggcggttttagccgatgatcggggctatttgaccgcatcggcagacgatgcgacgggcagggaggctgcggttgccgcttcgagcgtgatcaagctttacgattcgacttctccgttctcatctcagcagtggtatcttgtcggccttgtccccgagaacacgctgttccgcgcatcgcaatcgctcgagacgaacctgcttgtcattttgggggtttcgttcggagtcggcgttttgctggcggctgtggcagcatggttctcgtcttcgcgcctgcgccgccttatgggcgaggttcgcggcgtgggcgaagctcgcggcgtcgatcctgccgagcggttcgtgtttcgggaaaccggcgtgcgggagatcgacgaactcgccgactccatcagcttcttcggctcggggctcgcttccgcggggcagaggctctcgcgcatcatggcgttgtccgaccatgccgtcggcgcgttcgagtacaacaggaagacgggggatatcacctataccgatcggttcttcgaaacgctgggtgcctacgattttcccgggcttccgaagggcatcgcgcagcgcgatcttcggcgcggtacgctttcgcctgaggatttcgaacggctgatggatgcgtacgatccgtatgcggaaaacgacgcgcagggggcgaagatcatctcccttcctcaccgggagcgtttcctgcgcttcgtcgtgacagacgatgcggccgagggcagcgcgttcggcatcgtggaagacgtgacctacgagatccgcacgaggagaaggatcgagcatgagcgcgatcatgacattttgacgggtctgctcaaccgccgcgctttcgaacaggagcttgcaggcatcttcgcgcggggcgatctggagttcgccgctatgggcatgctcgatctcgacaacctgaagttcatgaacgattcgttcggccacgattggggcgatcagtacatacaggccgccggtgcggcacttcaatcggtcgtgcgggagggcgatgtgtgcgcccgcatatcaggcgacgagttcctcgtgttcgttcggagctgcaccaccgaagaagaggtggcgcagcggttcgaagaactgaggggacgcctgtcttcggcggtgatcgaagcccctgacgggcggatgctcaaggttcgggggtccatcggcgttgcgctgtatcctcgagacgcttccaggtacgatcagctgcgcgactacgccgacttcgccatgtacacggcgaagcactaccgcaaaggcgaactgtgcttcttcgagaagcgacgctacgacacgcagtcgtcgctgctcgacaagcgggaggatttgaacaagctcctcgacgagatgctcgtcgactaccacttccagccgatcgtcgatgcgcgcacgggcaccgtgttcgcctacgaggcgcttatgcgcccgctgctgaaatcgttcgactctccggcggtcgtcgtcgatctcgcccgcatgcaatcgaagctctaccgaatcgagcagatgaccttcttccgctctctatccgtcttcgaagagcgcgatccgggtaccggcgcgaagctgttcgtcaacagcataggaacgcagagcctttcgcttgaagacgaacaggacatcgagcgtcgtttcggctcgctgctcgaccgtgtggtgatcgagataaccgaaggcgatttcggacgcgagctgttcggctacaaagagtcgcttgcgcgtagatggggatcgtgcttggccatcgacgatttcggcgcgggctacaacggcgatgcgacgctcctcgagctccaggcggcattcgtgaagatcgacatgtcgatcgtccgcggcatcgacgccgatgtagatcggcaggacatcctcagatcgcttctcggctacgcccatgatcgcaatgtgcgcgtaatcgccgaaggcgtggagaccgaaggggagcttgccgcggtcattcggctcggcgtggattacatccagggctttatcgtgggaaaaccgtctccgacgccttccgatgcgattgccggaatggatgaggtcatcaggaacctcaacggccgatcatgaacgctctgtgaacttcctgtaggcattgggttcaaatttgcgccgatccggcgttgctttgttaagctaccgcctagtgtctacgaaaagtgacgctcaatcaggaggttgtatgagagagcaagcagcaccaagccgcatgaagagagcatgcacgatggttctcgcggcggccctggcgatatcgctcggggctccggccatggcttttgcagagccgacggcggccgataagcaggcagaagcagaaaccgcgctcgcgcagctgaacgcgatgcaggatactttgaataaagcttccgacgattacttcaccgcactcgacgaactggagcaggctcaggccagcatggaagacgcgcaggctcgcatagacgaggccaatgcgcagatatccgagctccaagacaagctcggcacccgcgcgaacagcatgtatcgcagcggcagcgtcacgttcatcgacctccttctcggagcgtcttcgttcgaggagttcaccaccaactgggacatcctcaacaagatgaaccaaaacgatgccgaaatggtgcagcagaccaaggatctccgttccgaggtgcaggctgaaaaggacgagtacgcccgccaggaagccattgcgagcgagaagaccgaggaagccaagcagatcaaggaagaggccgaagcaacggttgcttccatgcaggagacctacgactccctgagcgccgaagcggccgagctgctcgaacaggagcgcgctgcccaggaggcggctgaggccgccgcggcgcaggccgtgctcgaccaggctgccgccgaggcggagcagagcaacaacaactcgaacaacaacaataacaattcgtcgaacaacaacaactcgtcgggcggcgtcgagcctccttacaacgccgtaacgggcaacgccgtggtcgatcgcgcgtacagctacgtcggcaacgccgagtacgtgtggggcgcttgctcgcccgggcagttcgactgctccggcttcgtgagctactgcctcaccggcagctactcgcgcctcggcaccacctataccttcctcggctggccgcgggtttccgatccgcagcccggcgacgtggcggtgaactcgggccactgcggcatctacatcggcggtggccagatgatacatgctgccacctacggcgtcggcgtcgtcgtaggccccgtgcaaagcggcatggtgttcgtgcgttactagcacccaagacgcgcaggacggcatctgtcctcgatcaaacgggaaaacgagaaggacccgccattcattcgtttgatggcgggttcttcctttcggcatcggtgcgcccgccggctgcggagggcgcagccgcccgctgtgtgcttactgtaagtattcctgtcagcgccgatcatggatggcgccgttttggtaagctgtctttatgtgtgcctctgagcaaagccgtccgatcgggaggtcgtatgaggggatatgaggagcaaggccgggccagagcagcgtttcggctcgtaatcgctgcggtgctcgcagcaacgttgggtcttcccgctgtggcgtttgcggagccgacggcggcagataagcaggccgaagcgcaaacggcgctcgtcacgctcaacgaactccaggacaaactgaaccaggcttccaacgactacgccgaagcgctgagcgaggtcgataccgcccaggcgagcatgcaggaggcgcaggagcgcatcgactcccttaccgtcgaaatcgcggatctccaagtcaggctcggcgatcgagcctgttccatgtaccgttcgggcaatttcacgttcctcgatcttctgttcggcgcagccagcttcgaagagttcgcaaccagctgggatatgctcgaaaagctcaaccagaacgatgccgatatggtgcagcgggcgaaagacctgagcgatcaggttgaagccgagaaggacgagtacgcgcgccaggaatccattgcaaccgaaaaagccgaagaagcccgcgcgtgcaaggaagaggccgagttatcggctgccgccatgcagcagacctacgattccctcagcgccgaggcggctgccctgcttgccgaagagcaggctgcccaagaggcggcgcgtgcagctgcggcgctcgacgccatcgagcgaaatgcgcagacgtccagcgaaaacagcggcggcaacggcgcctcgggcaacggatcttcttcgggcagcgcgggcgtcgagcccccttacaacgcggtcaccggcaactccgtggtcgatcgtgcgtacagctacgtcggcaacggccaatacgtttcgggtgcgtgcgcacccgggcagttcgactgctccggcttcgtgagctactgccttaccggcagctactcgcgcctcggcagcacctacacgttcctcggctggcaagaggtctccaacccgcagccgggcgacgtggccgtaaacgcggctcattgcggcatctacatagggggcggccagatgattcatgcggcctccccgggtcagggcgtggtcgtgggcggcgtgcagtccggcatgatctacgtgcgatggggctaggcggtaggcacggcgtgtccatgaattgggattcgggtttcatcgcagcgctcggcatcgagtttacagaaacgtccgcaatgcggatcgtcgccactatgcccatcacagcctccattctgcagccccatggcttcgtgcatggcggtgcgaccatagccctgctcgaatcggtagccagcgcaggggccgaacagagcgtcgatcttgcgcttgagaggcctttcggcatcgacgtgcacgtgcggcacaggaaaagcggcgtaagcggcaccctgacgggcgtcgccgagcttgaccgcgtcgagcggtcgaagcagtactggaacgtcacggctttcgacgatgcaggcgatgtggtgagcgacggcgtgatcgttaccaagatcgtatcgcttgcccgcctcgccgagaaggaacgggaacgggaagcggccaaggacgcgcgctagccgttcggcgggattcgcatcgaaaagcgctcgatcagcgagcttgtttgcgcaggagcagagcgaacccgcaggcgataaacgcgagcgccgccgtgcccgcaacggggctcggcagggggtcgccgactttggccaaggccttcgctttcgtacgcgaatcttcgccgcctccctctttccactcgccctctccgggcgccggtaagggcgtgggatcggcggggggaacggcagcatcggaatatgcgatcgcgtagcgcgagaatcggtcggttgtaacggttaccgaagctcggtcggctgcgttttcatccggcagaagcgaggccgtccaactgccgtcgtcttcctgatgggttctcgcgatggcgaaggttctcgcatcgcctgattccgatgcgacggcgtcggggatggcgaacgtcatcgtgatgcccttgccgagcgaatggatctgctcgcttgccaaggggatgtcgtcggttctgctcttgaacgtctgcttcgttaccgtaacgctgaagtgcttcccgaggaggtactcttctcccagctttgcgtcgagcgccgcgcgctcggctccttcggcatcgacgatatcatcgttgatcaccgcttttatcttcaacagttcggcgcttccgtttcgaagcgcctgaatctcgtcttttccgaattcgtagacgaagtgatggagacagccgttctcgatgatggcgatctcgtcggccgaaccgccttcgccggctacctccaccacgacctcgacttggatttcgggaagctggagcaggtcttcgtgcagcttgtcgagcgcgtcggcatcgacgggcgcatcggggttttgttcgaggtgcgcttcgagatcgagtttggcatcgaggatggcgttcttggtttcttcggaagccgtgggcacatcggccgcgtcgggcaggttctcgatccgatcgtggagatcctccgtttcgagggggacgaagacggcggatacctcgcatgtatcggtgctgggggtaaacgtgtacgatacggcgcgatcgcttcccggggcgacgtcgcctgccgacatgccgtcgatcaggatgctttcgagccgatagccgtagtcggggacaaacgtgtaagttgcgggttcgtttcggttgaatgcgttgtctcccggttcgatcgttccgtgttcggcttgctttacggtgatggtggaacccgccgcgatggtccagagcgtgcggttctgctgtgacgtttcgtccttggcgaggtaataccgctgggggcgcgacggatcgtcgagcagcactttcccattgcctgtccgggcgaaatcgaacagcgtcatgccagtcgtcagcgtgcctgtgggatgcacttccagcacgccttcgagcgcgctgccgcttgcctcgtcgccgatgatggtcgcgcttgccggcatggtgatcgaggccgtggcctcgccgccggaagcgggcgtgcccgtgaggttgccgtagaggatcgtcggattctcgttgtagccgacaaagcttcccccgccttctatcgtcagattgtagacgcccataagatggtaaggtgcgcctgagccgtccgccgatacggtgctgggggtgaacgtcgcgccgttgtggatgaggatatcggtctcgccgatgtggtttggcgagtagacgccgctgacgaccgtctgcgtcgaagtgcccttctcatcgccgatctcgatgagaagggttcctttttgatgctcggcgtagatgaaatccttgcaggtggagtttcccacgaaggagacgatatgcttgcctccgatatcggaggcgctcgttgcgccgatgtagcccttggcgagcacgctgtcggcgaatacgagctttgcgtctccggttattcccgagcctgcgcgcggcatcgttccgtcttgcgcgggcaaggcgcatttgctgaagcggctttccacgttgccgtcgatcgtgccgttgccattggtgtcggagaggtaggcgccgccgtagaaatactttatatcgcagttctcgaacgaagacgatacgcttcccgtaacctgcgccgtgcttgctgcggtttggtcgccggcgatgtatccgccgttcgagaacacgtaggccgcatacccctcttcggctgtaaacgtaaccgaatccgcccctttgtcggagcctacgtgaacgtcgcccgcggaattgtaagaaacgttgcctgctgcggtaacccatctgccggtcaaggttgcatttttgcccatctcggtatggacggatcccgatgccgcactgcagtcggtcgagttgtagtaaacgtagcctccgccgatgaactggcctgccggcatcgtgtaggtatcgccgaagttcgtggtgacggatccttggacatcggtcgtgcagcccgtcgatccgttgtacgaaaagccgccgcccacaaaagatttcgttgcggtgccatcgccgaaatccgtattcacgttgccgaagacgctcgcttcgcaatcggcggccaagctggccaatccgcccccgatgacgaagttgccggtgaaggaacagccgtcgcccgccgaaaccgaaacgtcgccggttacgtttgccgtgcattcgattgcatggttgaatgcgtagccgcctccgatgacaaggccgcccgacgtgcatccctcgccgaaggcgaccgaggtgcttcccacgtcagccgatgcgttgcgcgctccctgcggcttgccgtcgaactcgtttccccatgcgatgccgcctcccacggctccccgcgttaccgaagcgccgggtttcgcctcgatgcgcgccgtgcctgcaacgtcggaggtgcatacgttgccttttgcgatgcctcccccgataacgctcattccggtgctgcttcccgaggtgaggttagctcccttgtggatgatgacttcggtcgaatcggcgcaggcggatgttgcaagatcgttcgagttgttttcggcgaatcccccgcctgcaacgaggttcgcgttctcgtagttcgctttctgcccttcgatgccgaacacttcgacgcgcgtcgccccgagcacgtcggccgtgccgcctgcaagcgcatagccgccgccgatgatgccggcggccgattcccacccgcatcgggcggtcatgatgacggttgcccccacgttggcctgcgcgccgccgtacagggcgcatccgccgccgtaaaagcgcgaaaacgccttgctgtcaggttgggattgcgccgccgtgtcgtcttcgagcgccgtgatggtgaccgttcctgcgacgtcggcggccgaacggttggcgttttccttgctggtgccggtggcgaggccgccgccgtacacgtgcatcttgctcatcgatcccgaagaatacgcctgggctttcgctccgaacgtaatcgatgcgctgccggcgacgtttgccgttgcggcggtgttggaaagggtgctgagcgcgatcgatgcggccccggcgcttccgcccccgtacacttcgtcgatcgagccgttcaccgtgatgttcgtcgagcccgttgtggccgcatcggcgctgagagcggcgcttccgctgctcgggaagcaggcgatgccgcctccgatcgccttttgggcgccgcctgcttcgccgatgtcgataaaagacgatccgcgcaacgtcgccgaagcgttcgccaggccgctgtccgaggcgtatgcccggcatccgccgacgacggtcgaggcggtgccttctacgagaatcgtcgcatcgcccgaaagatccgcgttgaggcttccgccgaacaggctcctcgcgaaggctccttcgcgaacggttatgctcgaagctcccgaaagaggcgtgccgttcgatccgccgtagatgagggcgttcattttcagaggagcttcgatgatgatcggcacgccgttggcgaacaggttgatgcagtaggaatccgatcctccgttgccgacgatgatttgctcgtttgcatccgaggtgatagtgagcgaggtcatgttgcgatcggtgggcaggctgaacgagatgccgcccggcagatagtcccgatagtcttggtacagatcgcttttgacgttgaagacgacatcgcccgcatcgtcgggtatggctgcgatcgcctcggcgaatccggcatagggctggccgtctccgatatcgaagaccgatgcggcattggagcgggcttctgcggagctttgcggggcggaaacgttggccttcgcttcggcttctactggaagggagtccccgccagcaagtcctgcggcctcccggtcggtctcgtcgtctatttcgtcgggggcctgaacctcatcgggcgcccctggttcccgttcgggctggacggcttcgctaccgttgacgtcgccgactgtcgagggagcctgggggggggggggtggagctttccgcgctctccgtctgcgcagcccaagcgcaaggggaacagagcgttattccaaggagggccgccatgcaggatgcgagcaggtctttcttcatcatgcttccttaatatataaccgaatcgcttatattaggatagctgaaactttaggttgagtccatgttaaatcgcctgttagattgcctgcttcggcaatttatccgagggcgtgccgccttgcgggcgatcgcgcggtagcggattcggccaatcgggcgctcgggatgagccttgcccgcgcccgagctgagcttgggcgatgctgcaatccttgataacttttgcccgtcagggcttttcttttcagatggttgtgctaatataacgtccgctgcaacaacagcatcgggatgtggctcagtttggtagagcgctgcgttcgggacgcagaggccgcaggttcaaatcctgtcatcccgaccatgtagactcgggatgtattcttttgttaagatgcatcccttatctataggtattgtggtaatctgacgaggttagattgcgcgggcggacgtcccgcatcaacgagtggaggacaatatgaaaattctcggcatgggcgttcccgagctgttgatcatccttgttgtgatcctgcttatcttcgggcccaaaaaccttcccaagctgggcagtgcactcggtaagaccgtcaagaacctccgcgaaggcatcggcggcggcgataaggaaatcgaagaggtcgaggaagaagaggaagtcgaagaggtcgaggaagagcagcctgttaagaagactgtcaagaagaccacgacgacggccaaaaagccggctacgaagaagaaggccgaatagtaccacccctcgggtatgttttcgcggcatgtgcagtgcgtgcacgtgccgcgttgtcgtataccgagcccaggttcgccgcgaaagcgatgggctcgatcgataagcgaaccgcgtacacgtaagcgcacgctttcaggcgtgcatgtttttctgcaacagacaggtgatggtatggcagacaaggattttatcctcacgcaggagggaaaggagaagctcgaagccgagcttcatttcctcgagaccgagaagcgtgccgaaataggcgagcgcatcaaggttgcccgtgagttcggagatatctctgaaaactccgaatacgacgacgccaagaacgaacagggcatgatggaggcgcgcatcgccgagatcagccgcattctgagcgaggcgaccgtcgtcactattcccaagcggtcgaacaaggtcaacatcggctcgagcgtgacggtcgacatggacgggcgggagcgcgtgttcacaatcgtcggcggcgcagaaagcgatgctgcggcgggcaagatctcgaacgaatcgcccgtagggtcggccttgctcgggcacaagaagggcgatgtcgtggaaacgcaggggcccaccggcaagaagatcgtgatgacgatcacgaaaatagatcactaaaaacacggccccggcgaaacgggccgccacacagcggttccgtcgaagcggtgccgagctttacgggccccgggaatcgagggcccgtttgcgttatcggacgatacgaaaaggaagcacatgagcgagacaacgaacaccgcccaggatggagccgagcagatcgaagacgatccgatcgaggttcgccgagccaagcgcgaggctttgcttgcggccggcaagaacccctacggccatgcgttcgagtacagccatcacatcgaagagctcgacgcgaagtacgccgatctgcccgatggggaatcgaccgaagatgccgtgaaggtggcgggccgcatcatggcgaagcgcgaccaaggcaagatcatgtttctcgaactgcgcgacgctacggccgatatccagctgttctgtcgcatcaacaccctcggcgaagaggtgtacgctgaattgaaggatctcgacgtgggcgattggatcggcgtatccggcaccatgatccgcacgcgtcggggccagctttcggtggcggtcgaatcgttcgagcttctgtcgaagtcgctcagacccctgcccgagaagttccacggcttggccgacaaggaaacccgctatcgtcagcgctacgtcgatctggtcatgaaccccgaggttcgctcgactttcgaggcccgcttcaaaatcatctcggccattcgctcctatatggaatcgcagggattctacgaggttgagacgccgattctccatcccattctcggcggcgcgaacgcaaagcccttcatcacccatcacaatgcgctcgacaaggatttctacctgcgcatcgcaaccgagctgcatttgaagcgcctgctcgtgggcgggttcgagaaggtgttcgaaatcgggcgtcagttccgcaacgagggtatggatccgttccacaatcccgagttcacaaccatggaggcctatcaggcttattccgatctcgagggcatgatggagctcacgcagggctacatccaggccgccgccatggcagcgtgcggcacgctgcagatcacctatcagggcaacgagatcgatctttcgggcgagtggccgcgcaagaccatgatgcagctcatagaagaggagtcgggcgagaaggtcggcttcgatatgacccgcgaggagcttgtcgggattgccgagaagtacggtgtgaaggttgaggacgcgtggggcaagggcaagctcatcgccgagatattcgaagcgactgctgaagacaagctcgttcagccgacgttcgtgaccgaccatccgctcgaggtgtcgccgcttgccaagaagaagaccgatgacgagaaccttaccgagcgcttcgaacttttcatctgcggacacgagtacgcaaacgccttcagcgagctgaacgacccggtcgatcaggcggagcgattccgggcgcaggtcgccgcgaaggaaaccggcgacgacgaggcgatgggctacgacgatgattacgtgcgcgcgctggagtacggcatgccgcctgcgggcggcgtcggcatcggcatcgaccgtttggtcatgcttttgaccgattcggcatcgatccgcgatgtgctgctgttcccgcacatgcgcgacgaggcgaggtaggcggtcccgaagcgccgcctggccgtcggtttcgctatcgtgcgccagttttggtgatgttgtgagagcgctttacggcaaggtgtcgttttagcactctcttgacttgagtgctaatattatgcggaaaccaaaaacttgcgagaattgaggcatgcatgagctttgagaaattcaccgacaaggcccgcaaggtcctcgtcctggctcaggatgaggcccgtgccttgcaccagccctacgtgggcaccgagcacttgctgctcgggttgatacaagaagaagacggcttggccgcccaggctctcgatcgattgggcgtcgaatacaacgccgtcgtccaagccatccgccaggtcgtcgcaatcgatgaggataccgatgtctcggggcatctgagcttcacgccgcgcgtcaagcgcgtgcttgaaaactcgctgcgcgaggccatgcagatggggcagagctatatctccaccgagcacttgctgctcggcatcgtccgcgagggagacggcacggcgctcgaggtgctcggtcgccttggcgtcacgggcgacaacgtccgttccgccttgaacgatcttgtgggccagagtccggtgtacgcgggccgcggcgcgttcgaggcgcaggctgcatcgtcggacagcatgctcaaagagttcggaaccgaccttaccaagaaggcgaccgagggcaagctcgatccggttatcgggcgcgcaggcgaaatcgagcgcgtcatgcaggtgctgtcgcgccgccagaagaacaacccgcttctgatcggcgagcccggcgtgggcaagaccgccgtcgccgaaggcttggcgcagctgatcgtttcgaaccaggttcccgatatcctgcgcaacaagcgccttatcacgctcgacatatccgcgctcgtcgcgggcagcaaataccgcggcgaattcgaagagcgcctgaagaagtacatcaaagaggtgcaggacgaaggcgatatcatcttgttcatcgacgagatccatacgctcatcggcgcaggttcggccgagggttccatcgacgccgccgccatcctgaagccgccgctgtcgcgcggcgaaatccaggtcatcggcgccacgacgatcgacgagtaccgcaagcacttcgagaaggactcggcgctcgagcggcgcttccagcccattacggtgggcgaacccaacgaggagcaggcgctgcgcatcatggagggcctgcgcgatcgctacgaggcccatcatcaagtgcatttcaccgacgatgccctgcaggccgccgtgtcgctttccgggcgctacattcaggatcgattccttcccgacaaggcgatcgacgtgcttgacgaggcgggcgcgcgcatgcgcatccgcaacatgacgcttcccaaggagctgcgcgagcttgatgacgagctcaggcgcctgcgtgccgaaaaggacgaggcgatcgcatcgcaggatttcgagcgtgccgcaagcctgcgcgatgaagagtctcagctgcgcgagaagcgcgccgaggccgagaagaagtgggaagaagatgctcagaagtccatcaaccaggtgacggtcgaggatatcgccgacgtcatctcgatgaccacgggcgtgccggtgtcgaatctcaccgaagccgagaccgagaagctgctgcgcatggaaagcgtgcttcacgagcgcatcatcggccaggaagaagccgtgacggcgctttcgaaggccatccgtcgcagccgttcggggctcaaggatccgaagcgccccgccggatcgttcatcttcctcggcccttcgggcgtcggcaagaccgagttgtccaaggcgctcgccgagttcctcttcaattccgaagacgcgcttctgtctttcgacatgagcgagtacatggagaagcattcggtgtcgaggctcgtgggatcgcctccgggctacgtcgggttcgacgagggcggccagcttaccaaggcggtgcgccagcgcccgtactcggtcgtgctgttcgacgagatcgagaaggcccatcccgacgtgttcaacatcttgttgcagatcctcgaagagggtcgcttgaccgacgcccagggccgcacggtcgatttccgcaacacgatcatcatcatgacgtcgaatgtgggcgcccgtgaaatcgcccagtccacgccgctcggattccagagcgatccgaacaccgggctgtcggacaaggaaatccacagccgcgttatgagcgagatgaagaagctcttccgtcccgagttcttgaaccgcatcgatgagatcatcgtgttcaagtcgctcaacgaggagcagatagcccagatcgtcagcctcatggttgccgagctgcgcgagcgcctgatcgcacagaacatgtccatcaacttgaccgatgccgctgcgcggcacattgcgaaggagggaaccgatgcaacgttcggcgcgcgtcctttgcgccgcgccatccagcgcttgcttgaagatcccatttccgagcagatcctcgaggggcggtggacgagcggttccatcatcgatgtcgattacgttgacggcgaacttacgtttgaggcgggaagcggctctatacctgcaccgcgcaaacgtgatagcatagccaaggacacagaattgctcctgaccaacttcgatctggggcatgcgggtgtcacgagcggcggctcgatgtcgggcggtgctgcagactaacgcgtgttttgaaaaagcgatgaaccttacgggagccgtcgccgttgcgcgacggctccctcgcatcgccgacgaagaagggcagaagaccacatggcgaagaccatcgatcctgtattttcgcctcaggtgctgaaaagacctgagctggcgcttgacgatcttgatttcgacgcgctttcgcagagtatggggggccttaagggcaagatggatgaaaaccccaaaacggcggccatcatcctggccggcggaacgggcgagcgcttcggcaaagaaggcggcaaacagctcgtcgagatcgcgggcaaacccatcctcacctggtcggccgaggcgttcgatgcggtgggcgatatcgggctcatcgtgatcgtgtgccccgaggatcgagaggacgagtacctcaaacgcgcagtcgatccgttccccttcgtcacgccggtcgtcgtcgccccctcggggccgagccgtcaggagtcggcgttttcgggcctcgaatgcgtgcccgacgagttcgagtacgtggtgctgcacgacggcgcccgcccgctcatctcgcctgatcttatcctgcatgccatcaacgtgctcaagggcaacatcgactgcgatggagccgtagtggcgcatcccgccgtcgacacgctcaaagtcgttgagaacggcgtcatcgtgggaacgcccgatcggcgggtgttctggaacgcccagacaccgcaggtttttcgctcgggcatttatcgtcgcgcccacgcttcggcactgtccgacgggttcatgggcaccgatgactcgtcgctcatcgagaggctcggaggccgcgtgctcgtggtcgagggaaagcgcgacaacatcaagctcacggttcccgaggactacctgctgcttgccgccgccgtcagatccatgtacatgagggatgccgagcagtgatcgagagcacccgacaggcttccagccaaccgcaggcgtcgggcgccgaagcgcctgccatgagttcgcgcgtctccgatgcgccgcagcaggacgcgtgcgctgccggccggtcgcaggaggcgaccgccgcacaggtgcctgccgcgttggcgagcctgaaaaccggcctcggattcgacgtgcatgcgttcgccgagggccgcaagctcatcttgggcggcgtcgacattccccatgatcgaggattgctcgggcattccgatgccgatgtgctcgcccacgccatctccgatgcgctgctcggggcggtgcgcggcggcgatatcggcaagctgttccccgataccgatcccgcctacaaagacgccgactcgctcaagcttctggctgcggtagccgaattcgtgcgcagctgcgggttcgagatcctcgatgtggacagcgtgatagccgcccaggcgcccaagctgtccccgtaccgcgatgcgatgcgggaaaatctggcgcgcgcgatgggcgttgcggtcgaatcggtgggcgtaaaggcgacgacgaccgaatggctcggctttgagggccgcgaagagggaatctcggcacgcgccgtctgtctcgtttgtcgatgtagcgggcaagagcgctaatctgcgcgccttgccgcatgcgatcggcatgcaatgctacaatgcacattcgactggaagacggatgctctatgaacatattcaagaccataggtgaagatattgcagcggtgaaggaacgagaccccgccgcacagaactcgtttgtcatttggctcacgtacccgggtctccacgcccgatggtcccacgtggtggaacactggctctggacgcatggcttcaaaagcctcgctcgcatctcatcgcagttcacgcgattcatgacgggcgttgagatacatcctgccgcggttatcggacgcaggttcttcatcgaccacgccatgggcgtcatcatcggcgaaacgacggtcatcggagacgatgtgacgctataccagggcgtgacgctcggcggcaccggcaacgaaacgggcaagcgccacccgacgcttggcaacaacgtgctggtaggcgtgggcgcctccgtgctcggcaacattacgatcggggataactcgaaggtgggcgggggagcggtcgtcgtgcgcgacgtgcccccgaactgcacggttgtcggcatccccggcaagatcgtcatgcgcgacggcaaacgggtcgaaaccgagaagcaggatgccgccaagcatcgcgagtgcttgcccgatccggtaaccgaggaatgcgagcggctcgccgagcgcatcgacgggctggagcgcaagctgagagaagcgcaggaagcgtcggcggtagacttgctggctgcccgcatcgacgaagtggaacgaaggttgggagagaaagcatgatcaaggtatacaacacccagacccgaagcaaggttgatttcgaatcggtcgagcgaggcaaggtgggcatgtacgtgtgcggcccgaccgtgtacaactacatacacatcggcaacgcgcgcacgttcatcgcgttcgacatcatacggcggtacttcatgtggcgcgggttcgacgtcacgttcgtgcagaacatcaccgacgtcgacgacaagatcatcgccaaggccaacgaagagggccgcacggcggccgaggtcgccgcggagtacaccgaggcgttcattgccgacatgcgtgcggcgggcgtgctcgatcccgatatcaggcccaaggcgaccgaggagatcgacgcgatgatcgagctcgtatccgagctcatcgaaacggggcatgcttacgacgcgggcggcgacgtgtacttttcagtgcgctcgtacccggcctacggcgagctgtcgcatcgcaacgtcgacgagatggagtcgggtcatcgcgagctgcgcgcatgcggctcgggctttgaagaccgcaagcgcgatccgctcgatttcgcgctttggaaagcggcgaagcccggagagccttcgtggccttccccttggggcgaagggcgccccggctggcacatcgagtgctcggccatgtcgcgcaagtacctcggccttccgttcgacatccatggcggcggtgccgatctcgtgtttccccatcacgagaacgagcgcgctcaaagcgaagccgcgtgcggctgccgattcgccaactactggttgcattcgggcatgctccagatcaattccgagaagatgagcaaatcgctcggcaacttcctgcttctgcgcgacgtgcttgaaaccacgaagccggccgtgctgcggatgctgattctgcaaacccagtacagaagcccgcttgacttctccgacgagcgtttgggcgaggccgaagcggctctttcgcgcatcatgaacgcggtgaagaacatcgagtggatcatcgagaacgccgaagacatcccctcgccgctcgatacgcgggcgattctggacgctacgcgaaacctgcgcacttcgttcatcctttcgatggacgacgatttcaatacggcgggcgcgctcggcgagatattctcctttgtgggagagctcaacggacagctgggcgacaagaccgtttccgtaaccgatgtcgccgcgctcaagcaggctcgcgataccgtcgtcgagctgatgggagccttcggtatcgatctttgcgagaacgaagcgtgcaaagcatatccggtggaggtcgtcggccttgcgcgcgagcttgcaggttatgcgggcgaaaatccggtcgaagcggttgacgcgctgctggaatgccgcgccgatgcgcgcaagcagaaggactggggtttggccgacaaggtgcgcgacgggctggtggcgctcggattcgtgatcgaggatacgccgcagggcgcacgcgtgacgctcggttaggctcggctcgtctgtggatcgctctcgaaaaaaacccgagctgctcgctcctgccgggggcatggaccagctcgaattcgctctgcatttcggggccgatgcggtgtatctcgcctgtgacaggttcggtttgcgccaacgtgcggcgaacttctcgctcgacgagattccgcgggccgtcgagctcgcccacgcatgcgaagcgaaggtgtacgtgacgcttaacgctgcgatgacgggcgacgatgtggccgtgttgccagcatacctcgaggcgctgtcagcggcgggcatcgatgcggtgatcgtgggcgatctgggggcggtgcggctcgccttgcgccacgcccccgatgtggccatccatatcagcacccaggcttcgtgcatgaacgccgaggcggcggcgatgtggcacgagctcggcgcgaagcgcatcgtgtgcgcacgagagatgagcgtggccgatatcgccgccttgcgcgccgccgcgccgaaagatctcgagctcgaggcattcgtccacggcgccatgtgcatggcggtttcgggccgttgcctcatcagcgatcatctcaacggcagatcggccaacagggggcactgcacccagccctgccgatggacgtattcgcttgttgaggaaacgcgtcccgacgagcgttttcccgtagaggaggatgagggcggcagtttcatattgagttcgaaggacctcaatatgctccatcacctcgacgatcttgcgaacgcgggagtcgattcgataaaaatcgagggacgcgtcaagaaggcatactacgtggcgaccgtcgtgaacgcgtatcgccaggtgctcgatggcgccgagccgagtgatttcgaccgtgatctcgaagccgtgagccaccggccctattcgacgggcttcttctacggacccgccgagcaggccccgcatggccccgagtacgcgcagacccatgcgcttgccggcacggttctctcgtgcgagcaacgcgacgacggcctctacgatgtgcgcatcgatctgcgcaaccggttcttagagggcgatgttctcgaggttctctctcccgggcaacccgtgcgagcgctttctgccgcccggattcgccgcatcgccgtatccgaagccgagggcaacccgtgcgagtgggaagaggcggtgccggtggccgatcgcgctacgaccgtctatgcgatcgcgagtccgtttccgctgcagcccaaggatatccttcgcgtcgagcgacccgatctctcagcacgttcgtcatagaacggttaacctgcgaaccgttccgatacccagctgctacgccgccgcgaccgacggatgcggcggcgttgatagacttttcccggacaagccaacgggccgccatgcggctttcgtttcgagggaagaggactagcgatgagcgatacagcaagcagcgccgcatatcggcagagaaaacaatcggtggcgcaggcgacgggcggtacgtggcgcgatgccggcgggcacgaagccaacgggacgcatgccgcaaagacgagcatcgtgctcgtgtgggttgcttacgcgatcacgatcgcctgtaacgcagcgttcgagatattcgcgttgggcggcacgacatcggcagaggtgtcgggcgaagtgtttgcgtggttcacgcctgcaggctacgtgttcgccatctggtcggtcatctacattgggcttgcagcgtggctcgtctcctattccggcgaagcttcgcacgacgagccgatgggcgcgatgcggataggcaggaccgcagttcttttcaccgtatcgtgcgctctcaacatcgcctggcttgcgctgtggcacttcgagctgttcgttccttcgatcatcgtaatcgccgctttgctcgcaacgatcggattgctgtaccggcgcgtgcatgtcgagtcgactcgcctgatcgacagggtgccgatctcgctgtacttcgcatggctctgcgtagcgacggttgccgatatcgcccatgtggcaactcgtttcacgggagccgagacctcgattctgcaacctgtcagcacgcttgtgctcgcggtggcattctttgcgcttgccgtgtacatgaaacgcgcgtttaacgactacgcgttcggggtggtgatcgtgtgggccgttgtcggcatcggcgtgcacctgatgaccgtgaacctcgcgatttccgtcatcaccatcatgctttccgggctcggcgccctcgccgtcttcttcccgtgggaaaaataccgcctccaaccgcgaaggtagaaaccgcgctcgccagctcaaaacggaagcagagtttgcgtttgctggatcggcttggagcagggctcgcgttcgcctgttcggaccgggaacagggcttgtccgcttcggctgggacggggttctcgcgcacctgtccggatcggaccgttgcgcgagcgttcgggattctaccggtgtcgacagcgtttcgaatgctcgcaaccccggactcttgcgatccccgagcgctcgcgactccgaacgttcggggtcgcgaatgtgttgcgtaagagcttcctttgtgaaaatcacgtcaaaaatggcggtcaaggcatgcttctgtcggtaaaacgcgccatttccggtgtgcccgagtccattcgggctgtcgcgggtctccttgatttttgcgacctgcgcaaacgttgggatttttcaatcctaacatgaagaagacgacagaagcatgccctgaccgccatttcggcgccgtttttccgaggttgtatcgaattgcgggctttcggtcctcggagcttatcggtgcgggtataatgctcgcatgaagattgcagaaacattcactcagggctcccagcccatatcgttcgagatatttccgcccaagggggatctctccctcgaggtcgcgcattcggtcgcccgggagttggcggatctcgaacccgatttcatcagcgttacctattcggcgggcggcagcggcaattcgggcgctacggcggatgtcgcccatatgattcaatcggaattcggcattccggtcatggcgcacctcacgtgcatcggtttaaccgaggatgcattggctgatcgcgtggccgatcttaaggcgaagggcatcgaaaacgttctcgccctgcgaggggatcgggttgcgggttgcgaaacaaccgactatgcgtatgcgaaggatatcatcgggaggctgtccgacgaagggttctgcgtcggtgcggccgcgtatcccgaaggccatatcgaatgcgacctgcttgagaagagcgtcgagcatctcaagcagaaacaggatgcgggcgcctcttttttcgtgtcgcagctgtttttcgacaaccggtatttctaccgtttccttgaagcgtgcctcgatgcgggggtgtcggtgcccatagcggcgggcattatgccgtttctcgggaaaacccagattcagcgcatggtgttcatgtgcggcgcttcgctgccatcgcccatcatcaagcttttagccaagtacgaagacgattcggagagcctgcgcaaggcgggcatcgaatacgcttgcgctcagctgaccgatctgcaggcccatgggatcgatggcctgcacgtctacacgatgaaccagcccgatatcgcctgtgcgaccgtcgaggcgctgcgtgcccaaaggggcgccgcgtttcgcaagccctgctggcggtaggcggcagctatgggttacggggtcgacaggaacgaagtcctgcgctacctcggctacgcggggcaggcgatggagcctgggcttctcgggcgcatcgatgccatcatcgatcgctgcgagcaggatctttccccgaaaagcatcgtggggtatttcggcatcgccgtgcatggggccgatgcggcggatccgagcggcggggtcggttgtgcgggcggcgccggggagccgtgcagcgaaagcgaatgtgcgggaggcgctgaggagccgtgcggcgaaacccaatgcgcggacggcttggcctacgtcgacgttgcgggcgcctctctgcgccttcccggtttcgatatcgtgcgccatctgcggggtgcgcgggaatgtgcgcttttcgcctgcacgctgggtgcgcgaagcgaacaggagcttgcgcggctcaacatcgccaacccgctcgatgcgctcgtctacgatgcggcgtgctctgctttgatcgagcgggttgccgacgcgacggaagcgcgcatcgtagccgaggcggctgagcgcggactccatgcgaattggcggtacggtcccggctacggcgacctgcccctgtcggtgcagccgcagttcctttcggcgctcaaggcgttcgaaaccatcggattgtcggtaaccgataccgatctgcttctgcctacgaaaagcatcaccgcgatcgtggggctgttcgatgcgccgcccgccgcggaaaagccgcgggtatgcgagtcatgcaatatgaaggatttctgcaccttgcgtgcaaagggaagggtttgccatggataagagatcggcgaagagcctccgctgcacccgacggggaggcgatgcggctttttgcgaaggcgcgtcctacgataggttttcgggccttgcgatcaaagacgagtatcttgcggccgttcttcgaggcgaggaatacctcgtgcaggacggtgcaatgggaaccattctgcaggcgaggggccttgtaaaacccggccaggaacccgatcttctcaccgtttcgaaccccgaggcgatcacggccatccatgccgattacgtggccgccggagcgcagatgctcacgaccaatacgttttgcgcaaaccggagaaagctcgcaggcgaagcgagcgttcaggaggttttctcggcggcgatctcgtgcgcgcgcgatgcgggaggccgctacgtggctgcgaacatcggcccgatcggggctctgctcgagccgctgggaaccatgacgttcgacgaggcgtacgatctgttcgccgagcaggtggttgcggcgcgagaggcgggagccgatctgctcgccatcgaaacgttcactgatttgctcgaagcgaaagccgccgtgctcgctgcgaaggagaactgcgatctgccgattttcatctccatgacgttcggcgaggatggcagaaccttccttggcacgagtcccgaggtggcggcgctcacgctttcggcactcggagcccatgcggttggagtcaactgctcgctcggacccgcggagctggcacccatcgtcgagacgatggtcaaatacgcgcgctgccccgtggtcgtgcggcccaatgcgggccttccgcgcgtcgagggggatgcgacggtgttcgatgtcgaacccgatgagtacggccgagccatggagcgcatattcgcagcgggggcgaccgtcgtaggcggatgctgcggaacgacgcccgcctacatcgagaagatcgccgctctggcggacggccgcacgcccagcctgcgcgagcctgcttccgtctgcgccgtagccgggccacgggaggcggtgatcctggaaggttccgaggccgctacggcggtgatcggcgagcgcatcaaccccacgggcaagccgcggctcaaagaggcgctgcgcgagggcaatctcgattacgcgatcggcgaggcgatcgcccagcaggaagcgggtgcgcagatcctcgacgtgaacgtagggttgcccgaaatcaacgagccggccgtgctgctcgagctggtcaagaagctccaggttgccactgcgctgccgctccaaatcgattcgagcgatccggaggccgtcgaggaggcggtgcgccgctatgcgggcaagcccatcatcaactcggtgaacgccaagcgcgaaagccttgagaccgtgctcccgatagcgaagcactacgggtgcgccgtcatcgccctcacgctcgatgaaaacggcatcccgccaaccgcagaagagcggttcgcgctcgcgcagcgcatcgttgaagccgccgcttcgtatggcattccgcgtgacgatatcgtgatcgactgcctggtcatggcggtgtcgaccaaccaaaaggaagcgcgcgagatactcagggccgtaacgcttgtgaaggagcgcctcggcgttcgcacgacgctcggcgtttccaacgtgagcttcgggcttccccagcgcgagctggtgaacgcgacgtttctggcggccgcgttcggcgcgggcctcgacatgcccatcctgaatcctctttcggagcgctacatggatgtcgtgaagagcttccgcgtgctcgatgccgaagacgggcaggcggcgaacttcatcgaggagtacgcagccaaacccgatccgtacaagggaggctttcgggctgcgcaggcatctgacggcacgcaggccgtttctgcgccagcgccggcgggggaggctcgaagcgacgatcccgtcgaagcggctcgccacttcatcatgacggggcgcaaggagcagatgccggaggcgacgctcaggctgctagccgaacacgagccgctgtcggtcataaacgacgtgttcattcccattctcgatcttgtgggtgcgaagttcgagcgaggcgagttcttcttgccccagatgatggcttcggccgaggcggtgaaagcgggtttcgacgtcattcgggcaaacgccgagcccggcacgctcgagagcgataagcgcatcatcctcgctacggtgaagggcgatattcacgatatcgggaagaacatcgtcaagatgctgctggaaaactacgggtatcgcgtgatcgatctcggccgcgatgtttctcccgaggccgtgcttgcggcggtgagggagcacgacgtgaagctggtcggtctttctgcgttgatgaccacgacggttaaagcgatggaggaaacgatacgcctgctgcgcgaagaagtgccggactgtacggttttcgtggggggagcggtgttgaatccagaatacgccgaaatgatcggtgccgactattacggcaaagatgcggccgaggccgcgcgcatcgccggcgagttcttcagcgggcgggtttaagacgggcgagggcttcggtcgcttgctgcgcgtgcgcggtcgacagagcgggacttgcagctcaatctgcgattctgagttccgcacgtggctttaagttgctatgatgggtgcatggtatttcccgaagagaagggggcccgtatgggaacgaaagcaacggaagagcttgacgtgtccttcgatgagctgccgatgtatctgcgcgctcatcattccgcttacatggaggtcaacggcgctttgtactacctgaccgacgtgaacgacatgtattggcgggcgcaggacacggcgaagctcaacgaaaaaggccactacaccgatgcgagcgagctggttcccactatggcggaattcatggccctgcccttcgtcgacggcaagacgatcgaagaggtgttcggcgaagcggttttctacgcttcggaaaaaagcgaatagccgatacgttggcggctggaatcccagccgccaacgcgtttcatggcgaaccgcctgtcgagaggcgtcgccttttagcgcttgagggccttgatggcgacgaggttcatgaaggcgcccgcaccggcttccatggctgctctgtcggcgcgcgcgtactcgttgtcgcaggcgagccaatcggtccacgcttgatcgaaacacgccatttccccgatcgaaacgatatcgatcgaatcggatggtccgagcaggttttcccaccatgagcaggagtgcatggtggaaagatcttcgggggtccaggataggagcatctcttcggggatgagaacggtgttcggtcccatgatgtttgatgaaacgaactcatccgacagttcgatgtgcatggtttcctccttttcggtggtgccgcattgtcccatatcggttgcgagcatgcaagcagagtcgctcgaagggcggaaacggctctgcgcggtcgtcgcgccgaggcgcgacgacgaggttgccgtatactcggtgcgaaacgcgaagcgataggagagagcatgatcgtcgagtacaagggcatggagcccgatacggcgcaggcggcattcgttgcggatacggccacggtgagcggagacgtggttttgggagaagagagctcggtctggttcggcgcggttatccggggcgaggtcgattcgattcgcatcgggagcaagagcaacatacaggataacgcaacgctgcattccgaccatggatgccctgtgatcatcggggagcgcgtttcggtggggcacaacgccgtcgtgcacggcgcagtggtcgaggacggctgccttatcggcatgcatgccacggtgctgaacggcgcccgtataggggcgggttcgctcgttgcggcgggggcgctcgttaaggaaggcgagctgatacccgaacgctcgcttgtggtgggcgttccaggaaaggtcgtccgcacgctcgacgacgagacggttgcccatactgcgaaaaacgcccaggtgtacgttgacgatgcgaaggagtacgcgaagcgctgcgacgcgcgatagagcgaatgcacattgtgcgtcgcctgcgttgggcgatcccttatcgcctgcgattgcgcttcctcggcggctctgggtaacgaaagcggccccgctgctgttgcggcggggccgctttctcttgttgccgattatccggcgctgcggtttcgcttaaggttagtcaacggctacgagcacgtcggttgccttcacgatggccacggcggcggcaccctcggcgaggccgagatcttcgatggcctcgttggtgatggacgcggtgatctttgcgccatcggcgatctcgatggcaacatggccgttcacggcgcccttttcaaccttggcaacggtgccggggaattggttgcgcgcggagatggtgtcgatgcgctcgctgcctgcggcgataaggacgttggaggccttgatgatggcgatggctttcttgccttcgatgagaccgaggtccttgatggcttccatggtgatatcgctcttgatggtatgatcgccaaccttgatggtgacgacgccgttcacggcgccttccttgacggcggctacggtacctgcgagttggttgcgcgcggaaatcttcattgcgtgctccttttcttcgtccgctgcggtttgcagcggctctttcctggtgacatctgccactctacgttttttcggcaaggcttcaacccctgtcgcaaaatcgttgggaatccgcttcgtctcgttacgtttcgcgcagaatcatactatactaaaacgagaatagaaaggaaggctatggagttcaagcagaaagctttggccgcagaagacgttgcgcacatgctcgatgtcagcaagaacaccgtttacagccttgcgaaaacagggaagctctcgtcgtataaaatcgggaggaaactgcgcttcacgcttgatgatgtgcaggcgtatatcgccggatcgaagcagggatcggctatcttccgtacgggctccgctgcctccgatagcggaagcctcgctacgtgggttcctccggtttcgggcatcgggaagcgtatcccccgcacggcagccgacgcctttttgctcggcggcgccgatgccatggtcgatggactggcgacgtgtttggcagaatcgggcgcgtatgtgctgcgaagctaccagaacagctaccaagccctcgtcgatctgtatttcgggtatctcgatgcggcggcggtgagcctgtgggatagttcgagcgaaacctgcaaccttccctatatcaagcgcctgttgcccggcatgcccgtgaaggtgttccagatggcctgctacacccagggtttgctcgtgcagcgcggcaacccgctcgggttgcgctcgtgggccgatcttatccattcgggtgcggtgcttgcgaatcgcgaaaggggagcggcggcgcgcgtgctgctcgacgagcgcttgcgcatcatggaagccgatccgaaaacgatacccggctacgagcgcgaggtgtcgtcggccctcgtgcagggttccctgatcgcgcgcaaggacgccgatgtgggcgtgggtaccgaaaaagtgtatcacatcaagtgcgcggactcgattacctcccgctgcaggcggagcagctcgtgttggtggttgccaagaaaccttcgaccgagcgcattgcgaagacggtgcagcgctgcctgaaaagcgatgcttacaaacaaggtcttgcaagcatggtgggatacgatttccgcttgctgggtgaatgcatatacgagacgtagcgggatgcccgcttcgacgggcgagctccgagggatcggatgcggcaaagcggctgcgtatcgtttcgcgtaccgccatttcctcgaaccggaaagcgctcgggcgtttacaatgcaacgtatcgtcggtaaaccagcgtgcgagaggtgtcctatgcgtgaaaaaaccagatgctcttgggcagggggcagccccctgtacatcgattatcacgacaacgagtgggggcggcctctgcattgcgatgacaagctgttcgaaatgttgatactcgaaggaatgcaggcgggtctgagctggatcacgatactcaagaagcgggaggcgtttcgagaggcgttcgatgagttcgacccgaacaaggtggcacgctacgacgaggcgaagatacaggagctgttggaaaacaaggggatcgtcaggaatcgactcaaggtgcatgctgccgttgcgaatgccaaggcgtttctggaagtgcaggaaaagcacggaagcttcgatgcgttcatatggtcttacgtgaaccatgcccccatcatgaatcactggaagacgatggacgaggtgccggcgtctacaccgctttccgatcagataagcaaggatctgaagaagttgggattcaggttcgtcggttcgacgatcatctatgcttacatgcaggcgataggcatggtgaacgaccatgttgccgattgctttctataccagggagcagacgcatagcttcgtcgcttcggctctgtactggcagcagctcagggtgttcggcaaggcgtactaaaaagaaaaaaccactgacgaacagtggttttgaatgtatggtggagcctagggggatcgaacccctgacctcatggctgccagccatgcgctctcccagctgagctaaggccccgtaaaaagtgcgagatttagtatacctgacttaaacacacggtcaagccccaatttttacgaaaacgatccaacgccctccgaggggatcgaagcttgaggatcgatcccgtccgtctcgtccgaccaagggcgacggattcgcctggcgatccgaatctgccgaatccgcctttgctcctgcaactgcatcctgcactcgccaatcctcaagcgaaatccaaaaagccagatcatctctccgaaaaggagctgatggacggttggcggacatcagcggcagagcgtttgtcggactcgtctcggacaagtgcagtataatgaattacgttatatatcttcggcagcgatacggcgaagccgcgcacgcgagaatcgggcagcttgaattggatggtaggcgatgacaaaagaaaagaaggttcccgttggcgccgatgggaaaccgatgacgtcgtggcaggtgtggttgcgccgcctttgcatcgtcttgctcgtctgggcggcgctcgaggtcttgctcggcgccctgcttgtgattttctcgggtttcgtccccgctgaccttctcaaaggaatcgaaggcctcggagccgacatcgatgcgcagttcttcgccaagttcctcggcgtttcggctatggtgggagcggttatcaacgtcgtcgtcgcattgctcggcatccgcggtgcgaagaatcccgcaaagatcgccctgttcttctggattgcgctcgttgacgccgttgtgaccgcctgggcgcttgcgggcagtttgtcgcagggcgcccttgatccgagcagcctgataagcggcctcttcatcatatcccttgccgtatgcgcgtggcaggtgcgcaagcagacggggtacttcgacgtgcatccctgagagttgcgtttttgttcggagcgggctcattgtagggatctgctttcgcgcggtcgagagaaagcaaagggcggccgacgccggcggggctgtcgaacatgcagtttctagcttgttcggttttgcttcctgatgctgtattcggctaagaaggcttgccgaaagaggaacgagtcgaaatcgaggcggtacttcttctgcagggattcgatgcggtacagaaaagagtttctgtgcatgaacagggttcttgccgcaatgctgacctttctttcgcagtacagataggtgaagaggacatccatattgttggtattgttgacgctgtcgtctcgttcgattctctcgatcaggctgtgcgcctgcaaatacgaatagagttccttgttgctgcgtcctacaagaagaaagtcgtagaggcactctcgaaataccgtgataggaggaaagggctttttctcgagggaggggggcagtgcgcttcggtgggagagggcgtatagagcctgcagatacgcgaagcgtatctcgaatgccgactcgactggatcagataggccgcagaggcctccgtgggcattgagaaacgcggcaacgcaggagagaaaaagggtttcctctctctggtcgtctaccggatcgttttgcctatcttcttgcgtgtgctcatgcagcaagatgaatttgtttccgatgcttgccattttgtctcttggaaactccatagccagctgggtttgatagtaatgacgctcgttcggcaatagctcttctggaaacgccgaaggagagaaggccaaaaccgaaaagcgggcttctttgggtatccctgccaaaaccagctcttcctcgatgaccgtttgcttatcgagctttcccgtgcagagtcccgtgagtgttttcgcgaatgccggcccctgcttttttcgtttgatccagtctttcctcaccagaatctcaacgtgattaacgaacaccttgaatgtgtcgacgaggcctttggttctaggcctcttgttgaacctcattacaatgtggatgaaataggcgccgttcagacggaatatgtaggatgcgctctcggtgtccgtcgttaaagggttctcgtgaatttttaggccattttccttctcccatgttttgaagaggttgttgcgcctgaagatttcgatggtttccagatcatggtatccgttgcggataaggcgttgcgaaacgccgtcgctcggctcgatcgtcttagtgaaagcgagaagctgaaaagaatagtccgttatcgaaacgaagttcgagagcatcgattcgctgcagtccaaaagccgctgatagctttcatggtggatcagttcggttttcatgcgatcttgccatagctggattcggttatgggcttgctggatttttaaaagcgcactgggaaaggggtcgcttgcgatcaggacatagcagcgagacatcagctcccgatggttgtccgagaagggttcggcttcgttttggagaatgcatgcgtacgcatcggcgttggcttcgaggaaagacagcgattcgctcggtccgccgacgaacaaggttgttcccgatccggattcagccgtttcatcgaattcggtgaaacgggtgggctggggagacttcgtcgctctcgctttcggttcgtctgctggttcgagcatatgttcttcttcgcggctcggggggcatatgagcagaaggtcgaagaaaagatgacggtctggctctgatgcgattctgaattccgacatgccgtcgatgagcatattgagagagaacaccgcttgtctccatgcaaaatagccaataattaactatattttaggtttttttaacgtaagaaacaagaattgtgctgactagaattctcgtcatcggagaaaacggcagtcggtatggaggtttgcagtggattacgccgagcgcctcaaacgcaatctcgctctctcagatgaaacgatggttcgcatggctcgcgcctctcaagccgaggatttctttgcgctcctgaaggagtacatacgcttgcgcttcgttatcgatgacggcgatttctggtcggatgacatccgcgagcttgcttcgtttagccttgagcatcaaagggctgccatcggcggcggagagccagacgggcttcgggatacctctttgaattgcgctggcgcatcgtctgcggaaacaaagcagatccttctcctcatgaaacttaaaaaagatttgaccattgatctttctccagaatacatcggaactgcaaagagcgtttcggacatcgcccagcgtgcgttttcccagatcgaggcacgacgtgctgctgggcagatataaaagtaaggatacgaaaggagacggaaagatgagcatcgacaatgcacaggacgtgaagctcaatatcaagccactcacgatcgggctcgttcacgaatacgtgttcgagggtccctgtcgttttggcaggggggaggaactgactgctgagttcgacgaggcgcgcaccgctcaaatagcaggagattggaacgagcagcttgtcaataatctcggcaagttcggattcgtaaacgttatggatccttacgtcagcaagcgggacgagacgtttccccttaccgacgagatactcgacgaggcttgcgctgacgcggaggaggttgatctctacgcggtaacctactaccccttcgggatcgatttggctctgcaggttgccaagcgtactaagaagccgattgcctgcctgctcactggctctgcgacgggcactgctaccattgcgacgttgagcgcccatggttgcgaatgctacggttggaccaactggcaagaagccgaaacggatgtcagggctcttcttgcgcgcaaggttatgggcagtcttcgcgttcttgctctcgttcgcaataattccaccacttccatcagcgcacccgactcctttatcgaccatggggttgtcgccgataagatgggcattcgcttcacctacatgaatcttcacgaattcgtggatcagacgcacgagtgcgatccgtccgaaaacccttcgcttccgggtcgcgtcgaaaacaacattacggcagaggaagcagcagagatagagcgcatgaccgacgaactggttgcttgcgcttgcgaagtggatatgcctaaggaaaacgtcgccaaatccatgaaagctcatgtccttacgaaaaagctgcttgcaaagaccgggtgcaacggtttcacggctccgtgccccgacatgtgcgcaacccgtcgtctgaacgaagagcagttcacgatgtgtctgaaccactcgctgaacaacgaagagggtatctgctctgcgtgcgagtatgatgtgaccgctctggtttccatgcagcttcttagcgcaatttcgcgtaccgccccgtacatgggcaatacgatgatcgtgaaatacgatgtcgattctaccgtgtctgccccaaagtctttgtccaagcacgaggaggctttcgccgcattcaaagagtccatcgagggccgcagcggcattgtctgcacctaccattccacgcctaatcggaaactcaagggcttcgatgccgatgcgagcgattatgccatccgcccctttgcgatggatggtcgctggggagctaccatccggtacgattttgcaaaggacgcggggcaggtggtcaccgttgcgcggttcgacccgacgtgctcgaagctgttcgtggcgcgtggaagcatcgtttccggggctggttactatgacgagaactgctctgaaggcgtgtactacgccgtgaacgacatagatgctttcaacgagggaagcaaggccaccggcaaccatatggccttggtgtatggagatgtgttcgatgcgaccgttcgctatgggcagattgccgggtttgatgtgatcgcctgtgcgtaaccgggattgccggtggataagatggaagtcgatcagcgcatacgcatagcgcaaaacaagatagtcgctcgtttcaccgagatggacgatccgctgttcacctatgagttgctgcttgattctgctcgcagatttcgtccattggacgaagatgacaggcgtgacgaatacaaagtgcggggatgccagagccaagcgtggttaaagctgtcctgcgaaggcggtgcgtttcatatggaggcagacagcgatacccttgtcgtgaagggaattatcgctcttttggcagaggctttcgaaggtcggcaatgctcggatgtcgccctggctcccgtatcgtttctgcaggaggcgagagtgatggacactttcgacgcttctcggcgcagcggcatcgaaaagattgtcgagcggattcaggctttcgcgcgtgcctgctgacggatcgaaaagcggtgggcgttggcatcgtggttcttgtttcgaagctcggcaccatgacgccgagcggggtgctatcgccattaagtacggcggctttactcctgtcgccgtgtcttccggcgtttcggcgaagcccaaatggttttgtcgaaacgccggaaagtcgcatatgccgttattcgtttgggctctccgctggttctctttcggctgtcttcatgctgccctttttaacgccggtcgccatttcggccagtatctcgcccacgatttttccgtgcgtgatcgccatgccatggctgatgcccggggcggcgagggggtagtcgacgaggaatctgccgccttggcagtttccgacggcgtacaaaccctcgatgagcgtatcgtcttcggcgttgatcacctggaaattcgtattggtaacaaggcctcccatgcaaacgagcagcacagtatcggtcatcgggtaagcgtaaaagggcggctcgacgatggggaacatgcgatcggagcgcttgttgaaatcttcgtcgacgcccgcttcggcgagttcgttataccgatcgatcgtgttcttcagcgcatctgcatcgacgcccatgcgtatggcaagttcttcgagggtgttggcgaacacgccttcgccgtcttccgagaagtacgaatcgaagccgggggtgttgccgtcttcgctggcttcgtcggagatgtaggcgttcttgccgtacgagccgttcggtacgtcgtcggcgttctccatgtaccagttcacgttgccgtgcccgacgtccatggagccgatctgctcgggccatttcgaatcgaatacctgccaggctttcttctggggcaggcgcgatatctggttttgcagccactggccgcccacgtcttcgttcatgaagcggtcgccgtagacgtcgacgagcaagaaaccgtcgactccgagagggcctccgaggtggtgggtcatgggcgcgtggggtccagcctccattttcgcaccgatccacatgcccatacgctggccgtcgcccgtattggtcttgttccccttcgcgtccacattgggaaatatgctgttgaatcgcgttgcccaacgcacatagtactgcatcatctcggtattcgacgagtaatcgcccgttgcgagcagaacggctttcgatgcgtttaccttgcggtagccgtcgtcgatgcccatgatgatcacagcttcgacgcggcctttgccgtcgtcgccgcgaacgagctggcgcgcccatgtcgagaatctgaattcgacgcccagatcgagacaggcctggtatgtttccttcaggtacggatgcagctccggcagcagtacctggcaggtgtcgaagacggggtagtagtcgttttcgggatgggcggcttcggggtggggccagtggagttttcttaccgacatgctctccccgtcatagggatcgctttcggcttcgatgacgtagtcgccggcgcatggttcgaggaaccaatcgagcgcttcgccggaacggttggcccaaaggctgaggattcgctggttggggcggtagccgcactccttcatgagctgcgacacaacctgtttgccgtcgatgtcgatctcaagggcttcctgaacctggccgcctatggtgccgacctggttcgagcggcattggtaggagtcggccttttcgatcacgatgaccttttcggcgccgttttccgccgcggcgcgtgctgcgcagaggcccgaaagccccgcgccgatgatgacgaaatccgcttcgatggtttccttgagggagctctccgctatggggtcgggaatctgaaggaattcgggcgtcgaggtgtcgttggcggcgatgcccgaggctcccgttgagccgctgttggactcgtcgatggctgtggtcgagaccgatgccgaaggggtgcatcccgcaaggctcgcgccagcggtcacggccgcagcggcgccaagccccagaaaggcgcggcggctgagatctcttttcggacgaagctcgtcgagcgttccggtttcgtggtccatgggtccggctcctcgtatgcgaaaaacgcttcaggggatttcccgagcgatgcgaatcggttcgttttatagtaaccgaaaggggataattcaagcaaagaaaccaaaaaagcccatgcggtcagcgtagagaaccgcatgggctacaccgttggttgtacgtagccgcaacgtgcagatgaatcgtgcggatggcccggctattcggccttccactccgccttttcgatctgggcgacgatcggatcgagcgcatcggcgacatcgtactcttcgactttgccggcatcgcacaggcgagcgaaatcgggatcgatggggagggtggcgtatgccgggatctcgtagcgctctgccacctctttgccttgaggctcaccgaagatatggtgcttcttgccgcagtccgggcacgtgaaataagccatgttctcaacgaggccgaggatcggcacatccatatcctgagccaggtgaacagccttgccgacgatcatcgcaacgagctcctggggagccgaaacggtgacgatgccgtcgacgggaagcgattggaacaccgtgagaaggacgtcggaggttccgggaggcatgtcgacgaacaggtagtcgatctcgccccagttcacctcgttgaagaactggcgaaccgcattggagacgaccgggccgcgccatgcgacgggcaggtcgtcttggggaagcatgaggttcgtcgagatgaccttgatgccgctttgcgtctgcgccggcaggatgccgttcgcgtcggctgaaagcgggttggtgatgccgaaggtcttggggatggagggacccgtcacgtcggcgtcgaggatgccgaccttgaatcccttcttctgcatgctgctggcgagcaggctcgtgacgagcgatttgccaacgccgcccttgcccgagacgacgccgatcacgtgcttgatcgtcgattggtcgttcggtttgagcgtgtggtcgaccggttggctgcggtccccgcagtcggataccccgcagccggagcattcatgcgtgcattcttctgccatgactccttctttcttttgcccgttgacgggccgttctcatccaagccctgcgtctctcgtcttgctgcagcggcgccaaggctttatctcgtgataggcggtatggtatcacaaagtgcgaagatcgaaccgctcccggccatctattgcggcgatggcagcatcccagatgcggtaggcttgctcgcagaacatcttcgcgtcggcgatgcggggcgcgttgatgcgcgcggcgggtgctccgggaaaggccggctcgagaaatcccgccgagatgagccgggggtccaatacgacgtcgaacgggttgtcttcgaaaagggagggcatgaggatgtacgccggcacaagcacgtcccagcagcagaattcgtcgaggccgtaccagcgctccatcgtatcgaaccacgatgcgcagaggtttctgaccgtgccgccccccttggctcccgaatcgatgcggtcgaggaattcctcccgcttgaacgaggcgggcaagcagttgttcgcggttgcgacgacaacggtcgcgccgcgcgcggctgcctcgaagatcatctcggttgcctgcgggtcgcacgacaggttcagctcgtccatgatggtgccgttgaacgcgagcgtgcgggttatgccgcccatgagtacgatttcgcggaagagcgaaagcacgtcggggtcgagggcgagcgcgcctttgaggttggtggtcgagcccgtgacggccaaggagagctcgccggggcttgcgtgcgccgcgtcgacgatgaactgcgcggcttcggattggggatggtctttgtcgacggcgcccttgaggacgggtgcatcgagcccgaacgtgttcgctatcgcgagggcgttcgcgtataccgcttcgagcgtgttgttgccgtagctggcgcagatgccttcgatcgaagcggttgcccccgcttcgatgcagcccatggcgaacaggatggccaatccgtcgtcgacatcgcagtcgggaaggcccatcgtcgtatcggaatcgaagatgatgcgttttgcatcgttgcgcagctgatccatggaacccccgtttgcagaaaaaatcttgtaataaacaattaatagatatagtcttataatagattaaaccaactgttttgggaagacggtggcatcggttgcatcgagggcgagcgttttgccgttcggcggaccgggcggccgcgaggaagggagcgtacatggcgattgacgggatgcgcgaaggaaacggcggaacagacggcgcaggggctgcacgcgagctgccgagtgcgatgacgcgtcgcaggttcgtggcggttgcgtcgacggcggcggcaacggtgcttctcggctcggcgcttgccggctgctcgggcggatcggacggggatgtcggttcgggcgagggcgctgcgggcgagatcgattacgcgaactgggatgcggttctcgaggcggcgaagggtcagacggtttcatggtacgggtggggcggctccgagcctcgcaacacgtggatcaccacggtcctcgctcccgcgctcaaagagaaatacgacgttaccttgaatctggtcggcatggacatcaacgacatcctcacgaagctttcgggcgagatgcaggcgggtatcgaagagggcagcatcgatttcatctggatcaacggcgaaaacttctactcgaccaaggcaaacggctatctgtggggcccgttcacccaatatctgcccaacttcaacgactacatcgacgccgaaagcaacgaggttctctacgatttcggctcgccggtcgaaggctacgaagcgccctacggcaaggcccagatgcagatgtgggtcgattctgcaaaggtgaagagcatgccggcgaaccccgaggagtttcttgcattttgccaggagcaccaggggcaggtcacctaccccgagccgggcgatttcgccggcacggcgttcatctcgtgcttgattgcgggcgtcgtcgggaaagacgagttcgaaaagctttcctcgatggagaaccccacaaccgaatcggtcaaagccgtcgtagatccgggcctcgaatacctgcgctcgctcaatccctatctttggaaagagggttcgacgtttccggccgatgccgccacggtggatacgatgtacgccgatggcgagcttgtgatgaacatgggctacggcgcacccgaggcgctcgtcaaaaacggaacgctgcccgaaaccacccgttcgttcattttcgaaaccggcacggtgggcaactccaacttcatggccatcgccaagaacgcgaccaacaaagcaggtgcactcgtggcgatcaacgaggtcatctcccccgaaatgcagctttcgcagtacgaggagcttgcgaacatcagcgtgctcgatatggacaagctccccgaagccgatcgcaaggcgttcgaggacgtgccgctcggcgtgacgcagcttcccatcgacgagcttttggatcaccgcatcgtcgaggccgccggtccggtgattccgataatcgaacagttgtggctcgacgaggttatcggcaagtagcgataccgctatactgatttgcgatgccgcttgcggctcggacgacgcggaacctgcgggctccagcggccggccgggcgtcggcggcgtcgtatcggtttgcgaaaacaggcgaggaaggacgaggcgcgatgtcgttgcgagggcgtaagatcagaggagcgctggccccgtatgcgctcatcgcccccacggtcgttctcgttctcattttcgtgtacggcgtggtgaacggcgtgctccaaggattcggggtcatgccgtttctcggaaagaccgagttcacgttccaatactacatcgaggcgctcagtcgctcggacttcacggcatcgctcggattcagcctctacctctcggcggtgtcctcggcgcttgccgttgtgggcggcatcgtgctgtcggcggcgctcacgcgcctttcggcttcgcgtgcagctcggatcgtcggcatcaacatcccgctcatgaccgcgcataccctcgtcgtgctgttcgtggtttcgctattcgcgggcacggggctcgtcccccgcgccctttacgcgctcggcgtcatcgatgggataggggcgtttccctccgttgtgggcgatccgaacggatggggcatcattctcgtctacctctggaaggaggtgcccttcgtagcgttttgcaccatcgccatcatggcgaacgtgtcggaccgttacggcgaagcggcgcttacgctgggggcatctgctctgagaaccttcttttccgtaacgctgccgctgtgcaggggcgcgctcgtgaaggcgttcctcatcgtgttcgccttttcgttcggctcctacgaggttccgtttctgctcgggccgactctgccgaaggcgattcccgtcctcgcttacatggagttccaaaaccccgatatcctgaaccgctcctatgcgatggccatcaacggcatcatggtgctcatctgcacggtgctcgccatcgcgtacttcgtcgtgctgcagcgcgaaaggaggcgctgatgggtggaaagcgcgtcgcgaaactgttcgtcgccttgcatgtagcctgcgtccttgttccgcttgccatcgtcgtggcctgggcgttcacaagctcgtggccgtggcccgagctgctcccccaatcgttttccgatcgcggcatcgtcgagctgttcgtgacttcgggcgatctgggctcagtgcttgcgacgagcatcggcatatcgcttgcggtggcggtgctctcgacggttatcgcggccatggccgcccgtgcgcttgcctttcatcgattcttcggcaaggagctgttccgcttttcgaccgtgctgccgtttctcattccggcgacggtgttcgccatgggcgtgcaggtgatcttcctccgtgccggtcttgccaacacggtgttcggcgtcgtgcttgcccataccatcgtcgcgctgccctatgcgatcaccatcatgagcgaagtgaccgcggcggcgggcaagaagttcgagcagcaggcgcgcgtttcgggcgcgggccccgtgagggcccttctcgaggtgcagatgcccctgctgctgccagggctgctttcggcggcttctctttcctacatcacgtcgttttcgcagtatttcctgacgcttttggtgggcggtggtacggtgaaaacgtttgcgctcacgatgtttccgtatctggcaagcggcgaccgcacgattgccagcgcgtacggcgttgtgttcatggtggtgacgctcggcgtgttcttcctgttcgagctgctgctcaagcggttctcgcccgccaagaccgagtatttcaccgattgatcgaggttgatacgaaaggaagctgtccgactgtatgaagctatcggtatccggcataacgatcgatttggggacgaagcccgccaagcgcgtgctcgacgacgtatcgttcgaggcgtacgatcgggagtttctctcgttgctcggggcttcgggcgcgggcaaatcgactcttcttaaaatcatcgcgggcattctcgtgcaggatggcggttcgatcgcgttcgacgggcgcgcagtcgacggggtcgccgcgcacaaacgcaatgtcggctacgtgtttcaggacatgaggctgttccccaacatgaccgtcgaagaaaacgttgcgtttccctgcaagatgcggggcatgagaaaggatgcgcgctttgagcgggcacgcgaactgcttgcccacgtgcagctcgacggattcggcaagcgcgaggtgtcgagcctttcgggcggccagcagcagcgcgtcgccctggcgcgcgcccttgcggcaacgcctcaggttctgctgctcgacgagcctttttcgggactcgacgagcatctgcgcgacgagatgcgttcgctggtgctgaagctgcaccgcgaattcggcatgacgaccatcatggtgacccacgatgcgatcgaagccatcgagatgtccgaccgcatcgtgtacctcagcggcggcagggtggagcagttcgggcttcccgacgagctgttcgagcggtcggcaacaagcgagatcgccgcgtgcttcggcgattgctcgacgatcaaaggcgttgtggaggacggcgttttttccgcggggccgctgagcctttcggccaagggcgtggcgccgggttctgccacggcggtgatacggcagagcgccgccgcggtcgatgccggcatgccgccgctctttccggttcgatgctgcgtgtaccgcggctcgacgtatctggttcggatcgacctcgaaggccaatcgctgagcgtcccctcgccttcgccggttgccgatggcgccctcgtcggcgtggcgttcgacggatcgggcgtattcgtgtacgcggaagagggtggcgacgatgccggacgatgagctgacgagcggtgggcgatcttgcgcctgcgcggcaaagacgaagcaggtgccgggcgattgcgggatgtcgccggcgccggcttgcggcctcgagccgtgcgaggtggaagagtatctggctcgaagcgccgccgcgcgcgcggcgctcgacctgcccgaaggcgtaccgatcgaggctcgtctgctcgcgcggggcgaatacaacgcgaatttttctttcgcccaccccgtcacggggaaaaagctgctgtttcgcgtcaatctcggatcgcagatgcatctggacgatcagatcggctacgaggcccgcgctctggcgctgctcgaaccgagcggccggacgccgcgtgtgctgttcgtcgatccgtcgaagtcgtatttcggcaaaggggtgctcgtggaggaatgccttcccggccgtccgctgtcctacgaaaccgatagggacatcgccgccgaaatcttggtcgacgtgcatgccgtggcgctgcccgacggccatggccttgtcgtgcccgccgatcccctgggggccgtcgtcgacgaatgcgaggcgatgtttcgggtttaccgacggtgggcgcgcgcggatcgccaaacggtccggcgtatcgagcgcctgttcgcgcatgctcgccgcgttgcggaaaaaccttacgctcccgcatgtcgccatatcgtgagcaccgagctcaactcccgtaatttcctgataaacgagcggcttcccagctatctggtcgactgggagaagcccgttgcgggcgaggtcgagcaagacatcgcgcacttcctcgcgccgacgacgacgttctggaaaaccgaaacggtgctcgattcccgcgatatcgaccgttttgtcgaaacgtacgagcgcatggcagccggtcgcttcgagctcggttctttgagggagcgcacggccgcctatctgagcgttacgtgcctgcgcggactcacgtggtgcgcgatggcctacgcccagcatcgaagcggcgaacgatcggttgccgatgcctacacgttcggcaaggtggagtcgtttctcggcgattcgtttctctcgcttgtcgagcgggagtacttcgggttttgacccgagcgagccttgcattctgcaaggtcggctgctcgtcaatgatatagtactggcttgcgggctggtcgcgcctgcaaaacgagataaggagttgtcaatgctgttttccgatattgccctgctcgatgaaaacttcgaggtgcagacgaaccgatgggtcggcacgctcgacggtcgcatagcctacatcggggatacggctcccggacccgaagaggcggcgctttacggcgaggtgtacgacggcgacgagaagctgctcgtgccgggcatgtacaacgcccacgcgcatgctccgatgacgcttttgcgcggctacgccgagaatctgcccctgcaagcctggctcaacgaccgcgtgtttcccttcgaggacaagatcaccggggaggatacttattgggcgactatgctcgcctgcgccgagatgctgcgctacggcacggtgagcttcagcgatatgtactaccacacgcgcgagcgcatccaggcggtcgccgaatgcggcatgaagatgaacgcgtgcgagggacttcttgcgttcgagccgaagccgtatgccgaataccccatctgccagatgaacgaagatctgataagggaattccacggcagcgccgacggccgcatcctcatcgattacaacatccattccgagtatctgtcgaaccccgtcgtggtggccgacatcgcgaagctcgcaaaggagaagggcctcaacatccatgtgcacgtgtccgaaacgaagctcgaacacgaagagtgcaaagaacgccacgagggcatgacgccgatccgttacttcgaaagcctcggcgtgctcgatgttcccgtgacggctgctcactgcgtgtgggttgacgacggcgatatcgagatactggccgcgaagggcgtctacgttgcatccaacccggtttccaacatgaagctcggcagcgggttcgcgccggtggtgcgaatgctcgagcggggcgtcaacgttgcgctcggtaccgacgggatggcctccaacaacaaccacgatatgtatcaggacctctacgttctcgcgctcatccagaagggcgcaaacctcgatccgaccgccgtgtcgcccgcaagcgcgatgcgggcggccacgcgcacgggagctctgtcgcagggacgcaaggattgcgggcatatagcgcttggtgcgaaggcggacctcgcagtcctcgacgcgagcggtccgtcgtggtgccccgcaaccgacatgctgaacaacctcgtgttcgccgggcacggctccgatgtgtgtttgaccatggccgatggggcggtgctctatcgcgagggcgaatggccgacgatcgatgtggagcgtgcgaaggcggaagtcgaagtgcgcacccagcgcatcatcgcctcgttgtaagaagtcgcctggcggcaagatgcggcgggcgggccgattcgcgaaaggctttggctcgcccgccgtttttcctgtgttcgcttttgcggtcgcgtggggctgcttggctacgcgcctgcttgcgtgaccgctttttcaagatgggagtacatatcttgggcgcttcccgcgaagacggtggaaacgacgccgtctttgtcgatgacgacggtgtaggggatgccgcttgcggggtagagcgcctcgatcgcgccgtcctcatcgaggccccaggcgaagtcgtacccaagatcgctcgccttcgcttgggcatcggaggtcttgtcccctcggttgatggcgacgatctgaacatcgtcgaagctctgatcgagctcgttcagctcgggcatatcccgcatgcaatatccgcaccaggttgcccagaaggtcagcacgacaacgtcgcccttgtaatccgagagcttcgacgtttgcccgtccatggtttgaaactcgaaatcaggcgcctcgacgccctctttgatcgcgattttttgctggcttgaagaattgccgctcgcgttggatccggcgttctccgatccgttcgatccggtcgacgcgtctgtcgccgaacatccgagcagggccgtcgatgagagagcgagtgcgagcgcgaggcccaaaacccgttgtgcagtcgagcgtgcggtgcgtgtcatgaaagctcctttacgcttcgggcggcgcatcgtcgcgccgagacccgtctaaatgtaagttattcgctagcatatcacgaagcgagaagcggatggcgttggttttgcatgacgttacgcaggctccacattgtatgcactcgcggtcgctcaccgtgcggatatcgaccttgcataccgcaaggcaggctccgcagttcgtgcatgcttcgttatcgacgcggtagcgtaaaagagcgaaccggttgaaaaacgaatagagcgctccgaggggacacaggaaacggcagaacgggcggtacacgaacagcgaaacgaggacgagcgcaacgagcacgccgactttccagttgaacagactcccgagcatgaagcggagcccctcgttcatggtgacgagcgggatgcccgcctcgagcgttccggccgggcagaggtaagcgcaaaacgccggcgtgccgacgcctgtcgcacccagaagaacaagcggggcgatgatcgcgagcccgatgaggatgacgtacttgccccaggaaaacgcccggctccaggctcccttccttaccttgggcagcggtgtcttgtcgagcaggtcttggatcagcccgaacgggcacagccatccgcagacggttcttcccaaaagtgcgccgaaggcgagaatcgtgccgatgacgtagagcgggagcttctgatcgcttgcgacgagcgccgcctgcaacgaaccgatggggcacgctcctatggcgccggggcacgaatagcagttgagtcccggtacgcagatgcccttcgagctgccctggtagatggtgcccgtagcgaagccttcgaagttgaggttgtaaagcagggcggcgagcagctggatgatatgccgtttgaaccgggcgatcagcttcatttctacccgattccgatgcattcgtagcagacgagcgccgctttgcgcatcgtatcctggaagtcgccctgggcgatgccgagcacgatgagcgcagcgcccgcgatcagcacgacgagccaccaaggtatgcgatgagcgagttttttcatgggggcattgtagcttacggcgggcggtcgcgtcgatggctgcatatcttcgcaagaacatcggcacaaaagccattcgcctcgatgagcccgtccgccgcgttttgcgcatcgggcgctcgctttcaaggcgccgggctgccttcgggcgcggtaccgccttggcctgcatttgaacaccgttcaggcgaaaagccggtttctgcccaatgggctacttcgcgaaaagccgtttcgccccgctcgccatgaggtagataccgccgccgatggcaagcaagccgggacccggcaaaatcagcatcggcacaccgacgagcgtgcatacgccgcccgctgcgatgcgcgccgcaccgccaagccggcttttcggttggccgcctggagatcctgcgccgccggcatcgatgacgtgcgcgtcgacgggaacggttgaacttgcaggcgcgccgtttgcgcccgtatgccaggatgttccatcgaaggtgtagtagggtttctttgcggtgtggcccgcagccgaacccggcgtttgcggcgaggctgtgcggccgggttgctgtttgcgggattgatcgacgggcgtgacgtcgatgatgctgtcgtcgtgttccatggctgcctcgtttctagtccgttttcctcttgattatacggaaccgagggcctcgatcgccaatggcgatctgcgctgttatctttcggtaaggaaaagctcataaccataaggcccttgcgtgcgatcgccttccaggcgtgcgctgcgctgcccccggcgcgctcttgcggttcgggagaagatttcgatgtggttctttttatacgggagacgggcggttatacgggagacgggcggtcgtcgttctttacaggaggcgaacggccatcattctcgcttgtcgcaggccatgtttgcgctacactggtttgcaacggttttatcgcacttccaagttgctttgtttgtgtaaggctcgacagtggttcgcgccttgggaataaacaaaaggcgcgggccacgcaacaggaaagttggtggtcaatatggcagctcctgctaccgaacacgtgcgtaacattgtgcttgtggggcaagacggtgccggcaagacttctcttgcagaagcgatgctgcacgtctcgggaaaaacgccgcgcatgggtacgacccacgacggcaagtcctatctcgattacgacgacgaagagatcaggcgcaagttcaccatcggtacgtcaatcgcccccatcccttacaaagacttcaagatcaacgtgcttgacacgtctggacaccccgacttcataggcgatacgctcgcgaccatgcaggcagccgagatggccctgttcgtcgtcgacgcggttgccggaccgcaggttatgaccaccaagctgtggtacgaggccgaggatatgcgcctgtcgcgcgccgtgttcatcaaccatatcgatcgcgagcatgcaaacttcgattcggcgatggcgacccttcatgcgcgcttcggctcgcgtttgggtgcggttaccatccccatgggcgtcgatgccgagttcaagggcgtcatcgacgtcattcgcatgaaagcccgctatttcgaaggcgaaagcgagcatatcgtcgatattcccgacgaatacgcagacgccgccatcgtcgcgcgcgacaagctctgcgaccttgtggccgaggccgatgacgaacttatgatgaagtacctcgacggagaagaacagctcacgcaaggcgagctcgaagaccttctcgacaaggcgattgcccaggagctgttcatcccggtgttcgtgggatcgaccatcatcaagcagggtgtccaaggcctcatggaagatattgcaacctacttcccctcgccgcgtgcacacgggcgcttccgtctcgccaacggcgaagatacgttcatcgacgagggcggcgagcccgcctgcttcgtgttcaagacgctctccgatccctacgtcggccgcatgagcttcgtcaaggtgatctcgggcgtgctcgagccgggcatggagcttatcaattcccgcacgggcaagaaggatcgcctcgggcacctgtacgtcatgatgggcaaggaatcgaccgatgtgaaaagcgcgaaagcgggcgacatcatcgtggttcccaagctcaccgatgccaaaaccggcgatacgctttcccgctcgggcgatttggcgatcgacccccttcctctgcccgtgccgcagtatcccgtcgccatcgaggcggccgtcaaaaaagacgaggacaagctcggcacggcgctcgcgcgcattgcagagaacgatccgactgtgcgcatcacgcggagcgaggaaacccaccagaccgtgctcaccgctatgggcgatacgcaggtcgataccatcctggctcgcatgaaggagcaaaacggcgtcgaggcggtgctcgtgccagtgcgcgtgccgtatcgcgagaccatccgaaagaccgccgaagcgcagggccgccacaagaagcagacgggcggcgcgggccagttcggcgattgctggcttcgcatcgagcccaatccgggcggcggctacgaattcctcgatgagatcgtgggcggcaagattccgcgcagcttcattcccgccgtcgacaagggcgtgcaggatgccatggccgaaggtttcttggcgggatatcccatggtcgacgtgaagtgcgcagtgttcgatggatcgtaccatccggtggactcgaacgaaatggcgttcaagacggctgcgcgcatcggtttccgtgcggcgtgcgaaaaagccgaccccgtcatattggagccgatggcgaatatggacatcgtggtgggtgaggagtacgctggtgcggtcatgggcgatatctcgacgcgccgcgggcgcattgtcggcaccgattccaacgatgcgggcgaaaccgtgatcatggtgcgcgtgccctatgccgaggtggtcacctacaccaaagacctccgttccatttctcgcggcagcggctcgtattacattcagatagagggctacgaagaggctccgcacgatgtgcagaagaagctcgccgaggaataccaggcagcgcgcgcggcaggaaactagcgcgccggcttccgaagccgaggatgggttcgcccgagccgatcggatgcgtcttcccgtcgataagccaagcgtcggccgcacgggcggccgacgcctttttttgcccgagaccttgcgtccggtcgatcgatgggctaacctcgcctatcatcaaccgataccgataagatgccgctttcatgaaaaccgttttccagatattggcccgcgatctccggcggcttgtgcgcaacccgattgcgatgatcatcatcgcgggcgtatgcatcataccctcgctctatgcgtggtactgcattgcggcgaactgggacccgtatgcgaacacggcgggcattcgcgttgcggtcagcaacaacgatcggggagcgaaaagcgagatagccggcgatctcgatgcgggaggccaggtggtagaccaacttcggtccaatcacgacttggcatgggagttcgtttccgaagacgaagcgatagagggcgtcgaatcgggcgcgtactatgcggcgatcgtcattcccgaagatttcagcgaagatctcgtcggtgtgttctcgggcgatttcgaacaacctgccatcacctactatgtgaacgagaagaagaacgccgtggccccgaaggtgaccgatacgggtgccgcaaccatcgaagagcagatcaactcgacgttcgtgtcgacggtcagcaaaaccgtcatcgacatggctcaaacggcgggcttctcgatggaggacagagccgacgaggcgagcgaagggctttcgaaaagcgtcgaggaggcaaacggcgcgatcgatcgcatcgggacgctgcttgacggcgtcagcgcaaccgtcgacgactcgcgagatccccttgcggaaacccgcgagacgctcgacagcctcgaaaaacagatccccgcaatcaccgctgcgcttgatcagagcaccgagcttttgggagacgtgcgccaggctgcacgggatctcgatgcctccctttcggaatcggccgctcggggcgaatcgctcgttggggatgcttcggcgcaggccaaccttgcgatcggggagttcgcgggctctgttgcgaagatccagggcagcgtcgatgccgccctcgccgatctcgagcgcatcgccgacctcaacgacgatatcatcgaagagctcaaaggcgaacaggctcaacaccccgagctcgccgacgtcatcgccgcactcgaggcccaaaacgaacagcatcggaaaaccttggcggcgctcgaggatctcagcgccgatgtttcggcggtggccgaagcaaccgcttcggcatccgaggccgtcaacggatcggtgcaggatggcttggccgccgcatctgaagctcggcgccgtatttcgaccgaggtgcttccgcagcttgcggagggccttgatgccttctcgcggatttcgggcggcctatcgggaaccgtgtcgtcgcttgccccctcgattcagcaggcgcgcgggctgctcgatcagctctcgagcattctcgaccaaacgaaggagatcgcgctttcaaccagctcgtcgcttgcttcgatgcgcgacgagctgtcccgtacggtgaccgatctttcggctctcaacgattcggtgtcgatcgaggagctttcgacgctgctcggcatcgatcccgaggacgcggcaagcttcatgtcgtctccggtaacgcttgagaacaaggcgatctatcccgttgcgaactacggctcgggcgttgcgcccttctacaccaacctggctctttgggtcgggggctttatcctcgtcgccattatcaagctggaagtcgatcgcgagggcgtgaggtcgttttcgccgacgcaggcgtatctgggcagatggctgctgttcgtgctgctcggcctcgtgcaggcggcgatcgtctgcgccggggatctcgcgatcggcgtgcagagcaccgatccggttgcgttcatggcggcggggctgttcatttcgtttgtctacgtcagtctcatcttcgcgctcgcgagcacgttcaagcatattggaaaagcggtggccgtcgtgctgctcatcatgcagatacccggatcgtcgggcatgtatcccgttgagatgatgcctgccttctttcaggcggtccacccgtttttgccgttcacgtacggaatcggcgcactgcgcgaggcggtgggcggcatgtacggcttgacgtatgcggtcgacctcgctcggcttgcgatcttcgttcccgcggcgctgctcatcggcctcgttgcccggccgtatctgctcaacctgaacctgctgttcgatcacaagctcgcggaaaccgacgtcatggtgtgcgagcagaacaacctgccgcgaacgcgataccggttgcgcacggtgatcaaggtgctgctcgacaccgacgcgtaccgtgcaaagctgacggatcgcgccgagcgtttctatcgcagctatccgcgccttttgcgggtggggtggatcctcatcttcgcgctgccggcgttgatgctcgtcgtcatgtctctgttcgatgtcggcatcgacaccaagatcgtgatgctcgtcgtttggatactgtcgcttatcgcggtgatctcgtatcttatcgtcgtcgaataccttcacgacaatttgagctaccagcttgatatgagcacgcttgaaaccgacgatctcgagcgaaaactgcgcgagcacgtggtcgcccgcacggccgatgccgaagacggcgattcttcgccccgcaagaccgatggggacgggggcaggctatgaagaacatcatgcgcatctttcggggcgatttggcccatgcgaccaaaaacgtcatcggcgccatcgttctcgtggggcttatcgtggtgcctgcgctttacgcgtggttcaacatagcgggaagttgggatccttacgaaaacaccggggatctcaaggttgccgttgccaacgaagacaaggggtatcaaagcgatctcatcccccttgaagtcaacatgggcgattccgtcgtatccgcgcttcgggccaacgaccagttcgattgggtcttcgtcgacgaggacgccgcggtcgagggcgtccggtcgggaaagtattatgcggccatcgtgatccccgaaagcttcagcgccgatatgatgacgctgttttccgcagatataaagcattcgagcatcatctactattcgaacgagaaggagaacgccatcgctccgcgcgtcacggaaaagggggcgagctccatccaggagagcatcgaccagacgtttgcgaaaacggtggccgagataggtttgaagacgacgaacgatctgctctcgttcatggatgagggagaggtgggaagctacatatcggtgctcgaccggcaactgtcctcggcgatcgaccttttgggtgattcgtctgcgcgcatgtcgtcgtttgcctcgcttatcggatcgactgcttcgctcatggaatcgacttcggccatgctcggcagcacacagggctcgtcggccgacgccctcgatgcgatcgcctcgtcgaaatcgggactgacggatgttcggggtgcgcttggggaccttgtggaaaccgtccgtacggcattcgaccgggcgagcatcggctacgacgaggttgcggcgagcatcgacaaggccctgggcgatctggcggcgggatcgacgagcgcggcggcgagcctcaacgaagcttcggacgaaatacagggtctgatcgacggcatggtgcagatacgcgatgccctcgcggccgccgaacccgacagccccgtcctcgccgagttcgatcgttcgatcgaactgcagcggtcgctgaagaaccgcgttgacgagatggctcaaacgctttcgggcgcttcgggcgatatcgacggccagcgcgccgagatcgccgatctcgttgcccaggcaaagcaaagcgtgtccgacgtgcagtggggctatgccgcgcagctcgaagacgagcttgcgaagctcggaaattcgcttgatgacatcgcgtcttcttcggcgggcatcgccgatggactcgatggcgttgcagcgggtctttcgggcgtgtcggggtcgctttcgggtgatctggcttcggcgaaggcggctctcgaagaagctgccgaggcgctcggcagctcggccgataagctcgatgcggcccgatcgagcttgcggggcgcggcggagagcggcgatgtcgaagagataaagaggatcgtcgggtcggatgtgtcgacgatggcccagttcctcgcagcgcccgtgcgcgaggatcggcgggcggtgtacgccatcgcaaacaacggatcggctatggcggcgttctatacgattctgtcgctttgggtgggggcggtcatccttgttgcgatgttgaaggtcggcgtatcggatcggcgcgtctcggaactcgaagacgccaaaccctaccagctgtacctagggcgcttcggcatgttctccctgctctcgtttctgcaggctacggtcgtctgcctgggggacgtgtttttcctcggcatacagtgcgagcatcccttcctgtttatgcttgccggctggattgcgggcttcgtgttctgcaatctgatctacacgctgaccgtatcgttcggcgatgtcggcaaggcggttgccgtcgtgctgctggtcatgcaggttgccggttcgggcgggacgtttcccatcgaaatgtcggcgggcttcttccaggcggtgtatccgtttctgccgttcacacatggcatcgcggccatgcatgcgtgcatcggcggcatatacggcaacgagtactgggttgaaatcggaacgctgcttttgtttttgatcccgtctttgctgttgggccttgtgctccgcaatcccgtcatccgcctgaaccgattcgtgatcgagcgccttgagcagacgaagctcatgtgagagaagcgggcggcgtgtttcgtttgcagaggcggaagctgtcgtcgtcgtgcgaagaggtgctctttccgcaaggataggcgcacgtaagtccgctgtacgagcagagcacgggcttcgggcgcgcgatttccgagaggtcggccccgcattttttgcactgcaggtccgctcccgcgattatgtcgcgccgatcgaaaatcgtgcacgtgccgcactcggggcactgcgcagatttcttcggcgcgggttggcactttccgcagaaagggttgcaaacccagcatcctcccgccataatgcgtcctttccatggggaaacgaaaaaagggcaagataccaaacaatcgaaggccgcccataccctcgtcggtatgaaagcgcgaaatctaataccgggagccatagggtcgtttttcaaagtggcgtatcgtcttaccagtacctacggtgaatgatgagcattcggaacagggggatccgtatggccgagcatgccagtgcgtttctgatcgacaagaaaaccgcaaggatgctcgggttcaaaactttgcttgcgtggcattatctcgttttgttcacgccgatgttcataggggatatcaaatcgggttcgttccctttctttttcgagcggcagttcacgttgtatctgacgcttgcggtgtcgttcggcgtgcttgctctgttcgggaagcgaatgcttcgcaacaacaagaccatgccctcgacggtcgtgctcgtcgtcgcttgcgtgctggcgactgcatcctcgatcgtcgccattgcgttcgtcgggtcctccgatgccgtgctcaagcttgcttcgacggtgtttctcggggcgagcgaggccttgctcatgtttctgtggctgcattactatgcggtggcggcgggggagttcgtataccggtcgtttgccgtcgacatgatatgcggaggtctgctcgcgtttctcatctgcattctgcaatacccgttctcatccgtcgtcgcggtcgtcttgcctctcgtggcgggcatatcgctggtgctcaactggcaatcggtcgagccgcagcagcctttcgccccgcttccccttgctcctgcgccgtccgatcgggaggtgatgcgccatttcctcaaaaccgttctgccaaccatggtgtatgcgttcgtgttcggtcttctgcaggggggatacatcctgagcgaggtcgcgctgctcatggcgtacgatcctttgatactgctcggcatcctcgtttgcggcatcctcgttttcgcgatacccgaagatccgagtaagcattccgatatcgatgcgatgcaccgcctgtccatgttcctgttcgttctcggcatcgtgtgcttggccttcttcgacaacgtcatccacaaggtgtttgcggaaacgacgatcttcgccgggttcaacctgttcgactacggcgccatgatccttgccctcggcatgtcgaagcggcttcggacgaaggggctgcttttcatagaaggcggacgtgcgcttacctatttaagcttggccctcggcatcatggcgggagagcggctcatgctgctgtcgggaggcgattcggtaacgctctacaccatcagcggcatcgccatcacgttgcttgtcatcacgtcgctcacgcccttccgggaaggcgacggggatgcaagcgccccgggcttttcctcgaaaaccgtcgtcgcttgtccggggaagccctgcgcggactgcgcggtcgtgctcgggaaaagcgcttcggggggatcgggcgcgcctgcaggatcgaaggccgacgggacgggcgatgcggaggcgaggccgtcgggcgattcgccggcctcgggcggaatcgacggccagcgcgacggcggagccttgcgcggcactccatggaagcgcacctgcgccgaaatcgcgaagctctacaagctctcgcctcgcgaaacggagatattccttcttatcgccaagggccggaatgccgagtacgtgcagcagcagctcgttatatcgacccataccgcaaagacccacattgccaacatctaccacaaactcggggtgcattcgtcgcaagagatgctgaacctgatcgaagactacaagcgacagggaaagccgaacgatcttgcggatcagtgacgtgcgatgcgccgcccgatgcgacggatcgccggaaagacaacatgaagggaatggaatggacacggaaagaaacgacgctcaacccatcgatttgacacggttcgagctgaccgcttgcgaccgggtgacgatagcgatgcccgagatgccggaggtgtgcgaagacgacatcgacgcgcagctgttcgcctacgtggcaagcgcaccgaagggcagcccggtcaaatcgatcgccgatctcgacgacgcatgggtgagggagaacctgccgctgtacgagggaataggggaggttcgaaacgccatcagggcgaatctgacaaaggagacggctgcggcgttcgatgagctcaagtacgccaagtgcgcagacgcgcttgtcgggcgcctgcgcggcgatcttcccgccgaggcggtcgccgaaatggccgaagccgtgcgcgcccgcaacgaggacatgctgaggcagcagggactgacggttcggcgctacctcgaggatcatcgcatgagcgaaagcgactacgatgccaaggtgcgcgaagaggccgagcgggaactcgctctcaacgtggcgctcgacaagatggtcgaggcgacggcgacaaccgttgcgaacggcgagatcaccgaatacctcgcctgcgacgacccggaatcgtttctcgaagaagtgcgcgaaagcggaaggatcgaggatgcgcgcagggcggcatcgagagtcaaggtcatgcgtcgcgtgatcgagacggcgaaggtcgagatggcggccgaatccgaagcgtaggttgccgcctgtccgcgcgtgcggcaggcacgcatacggcgggaggaccagtcgagcggctgggcctcccgccgtttttcattcagggatccctcatggtcgttttcgcaggaaagaggctggaagaatctcccgtcaggtgggcgagaaccgtataacccccagtactagatcgctttttttcataccttcgtaggtataggagcgcgtctcgcaggtggtacgttacgcctcgtggatgcaccccatgccaccacggagctctaccgacgtaacggatgtacgagatgagagaaggaggaatcgcatgtgcttcagaccgccatcgttcgacgagatgatgaagaaatgcccctcatgcggatcgttcaacccgcctgagctgacgaagtgcaagaagtgcggcgccgatctgcccgagggcgcagccggcgcagcgggggatgccggaatgccggcacccggcgccccgaagggccccggcgctccccaggcacccggcgccccgaaagcgcccggcgcaccgaagccgcctgcaccgccgacggcgtaggcgggctgcacggcaagacgggcagcattgaaagctatcggagattcgatcgcgccaggctgaggaggaatggcgaacggaaggccgcatgcaagggggtaccggtcgcatgcggggccggatcgggtctctgggcataagagcaacaaatagttggaatcttacacgaaagggggaaattcatgatcaacgaatacaacaaagatctttacaaagaagactggcgttggtacgaagacggttatgaagtgacccgaacctcggtctggacgggccctggttgtcacaacgggtgcggcgttctttgctacaccaaagacggcaagctcgagaaaatcgaaggtgaccccaacttcggttacagccagggacgtctgtgcctgcgctgcctgaacatggtcgagaacatctacaacaacgaccgcctgaagtggcccctcctccgcgacggcgaaaaaggcgagaacaagtggaagcgcatcacgtgggaagaggccttcgactggcttgaggaaacctacgcgaaaatctgcgataccatcaaaaacgagtacggcggaatcggacccgagggcatcgtcgccctttccggtacgggtcgcaacgccatgtggcacggcgccatgtgcctccgtgcggtcttcggcagcccgaacatggcgttcggctttttgtcggcggactcctgctatcagcctcgcatgaccgcgaatctgatgaaggacggcgactgctggatcctcgatgcatcgcagctgcatcccgaccgctacgacaatcccgagtgggtctgccccgaagtggtcgtcgtctggggcaacgagccgctcgcttcgaacggcgacggcttcatgggccactggctcgtcgacctgatgcgtttgggcactaagctcatcgtcgtcgacccggcgctcacctggcttgcttccaaggccgatgtctggttgcaggtgcgtcccggcaccgactgcgcgcttgcgctcggcatgctcaacgtgatcatcaacgaagacctctacgatcacgacttcgttgaaaactggtgctacggattcgacgaactcgtcgagcgtgtggccgagtacccgaccgacaaggtcgccgagatctgctggctcgacgagcaggacatcatcgacgctgcccgcatgtatgcggctgccaagcccgcaggcgtccaatgggggcttgccatcgacatgcagatcgctgccatggaggcctcgtttgcgatttccgacctcgttgccatcaccggcaacctcgatgttcccggcggcaacgtgctcgtgcgctacgcgtacaacagctccaagaagtacggctgcggtctcgagttcatcgaccaggatatgctcgaccgccgcatcggcaccgaacaatctccgatccacaaggccggctacacgccgttcattccgccggatcttctgctcgaggccatggagacgggcgttccctacatgcctcagatgatgtgggtgcacggtacgaacccgatcgccaacatgggcggcgacgccccgcgcatctaccgcgcatggaagaacgttccctacacggtcgtcgtcgactactacctgactccgactgcggtggccttcgccgatctcgtgctgccggtcgccatgtcggtcgaacgcgacagcttccgctcctggtggcagccgctgcgcaccatcacggcatccgccggtcgctactacgagtgcaagatggacgaagagctggtgctcgatttgggcaagcgcttcaacccgaagttcttcaaccagttcaatgacgtgcacgagttcttgacctacatgatccaggacgacggctacggcgtcgattacaccttcgacgacctcaacaagaaggtctacgactggtgggatttcaacgagacctacaagaagtacgagaagggcctgctgcgcgaagacggcaatcccggattcgttacggcaaccggcctctacgaaatctactcgccgctgttcgacgtgtggggcttcgatccgctgccccagcacctggagccctacgagagcccggtccgcacgcccgagctgtacaaagagtatccctacatctacacgtccggtcatcgtcacatcggcctgttccactccgagcatcggcagctgccgaccatgcgcgaagtgcacccgacggcgatcgcggacatctcgcccgaaatcgccgaagagatcggcgtcatcgaaggcgattgggtttggttcgagaacaagcgcggcaagtgcaagcagcaggtgcacatcgctcccggcctcatgccgaagctcgttcgcgcgcgccacggctggtggttccccgagcaggagggcgcagagcccaacctgtacggcgtgttcgattgcaacgccaacaacctgaccacgatgggcgtatacgggccgacccactacggcgccccctacaagtgctcgctgtgcaagtgctacaaggtgacggaagaaaacgactgctcgccgagcgagatcgttacccagggaggaggtttcggtggaaatgactacacccgattcgaaggcaaataactacggcatcctcatcgattacgaatactgcacgaactgccatacctgcgaagttgcgtgcaagaaagttctcgatctgccgcaaggccaatacggtatcaaggtgctcgaggacggcccccgcaagaacacgctcgggaaatgggagtggacttacgtgcccctgccgaccgatctgtgcgacctgtgcgccgagcgcacggccgaaggacgccttccgagctgcgttcatcactgccagtcgggaatcatgtactacggtacgctcgaggaactggcggtcaagttggctgaaaagcccaagatggtgcttttctctaagtaaggcggaaaaggaggtaagcgagtatggctaagcaagaaaaaggcggattcaggccgcctccgttggtgaagattctctggacatgcgccgagtgcggtacgttcaacgccgccgacgcggaggtctgcaagaaatgcggagcccagaaggtcgttgacgagaagctcgtcggtgccaccaagccgatcgacgacagcgaacgtcacctgagggaagactagcgtttccggggcctttgccctttcggcaaaggcccctttttcaccgcaaccattcgcttcgcaaagtttgggtctatttggggactatcgggggaaggggccttccggcaaatcgtttggacggcgccttctggaagccaaactacgcacattgtttacgagtgagcacatcagaccgttttctttgtccttgcgaaccattgccgtcacctgccgaggtcggcatcaggcctgggcgggaattcaacaaggagcggaacatatgagtgcagcagcagcgaaaagtcctgggaagttcaccatatcccaggcgatagactccataggggtcaacaagttcaccatctcaatatttttcctcgtcggtatcgccatgatgttcgacggctacgactacatgatcatctcgtatacgaatacgcagatcgctctcgagttcggtgtcgacgacatagcgaagggagcgctgtcgtcgtggtcgaccatcggcatcgtggtcggatcgtttgcggccgggcccctctccgacggattcggccgcaagaagatcctttcgatcggcacgtttatgtacggcctgttcaccattccgtgcatcttcgcgccgaactatttgatcttcgcggtattccgcgtcatcgccggactgttcctcggcgtgtgcacgcctatcgtaacaaccttgtttaccgagttcacgccaacgaaacagcgatcgttcttcataacgttcggcatggcgtggatgatcgtcggctgggttatgtcggcgcttgtcggcacggtggtcgtgcagctgtggtcatggcacgtctgctatgcgatcggtgcattgccggtgctctatgcgttcatcttcaaccactttacgcccgaatcggcccactgggccgccgtgcacgggaagatcgacgtggctgaaacgacgcttcggcgcatcgagaagcgggcgggcaaggagatgccgtacgacttgtcgggatcgaacatcctcgtgccgcccgtcgccgcgaaggcgagccctgcggaggtttagaagggcaagtaccttcggaccacgttcgcactcgtggttctgtacttcgccggcaactttacgatctacggcgtgaacgcctggctgccgtcgatcatgcttgcgcgcggctacgagatcacttcggcatacctgctcgccatggcgcaaaacgccgcagcagtcatcgcaaactgcacgacgggcttcgtgtccgaggcgatcggacgcaaacgcaacatcattctcggatacgcggtatccatcctgtcgtgcttcctggcggcgtttgcaaccggctcgttctggctcgttctcggctcgctcatcttcttgggcttcgctttgaactacgccatcacggccgtgcagcccatgatgtccgagtcgtatccgaccgaattccgcaactcgggcgtggcaaccatcgtcgcgctggggaaatcggccggcatcttctcgccgatcgtgcttggagcgctgatcgggatggggttcgattttacggtgctcttcagcctgctggccatccccatggttctgggcgtgctcgccggcctgcttttgccgaagggcgcaaagggcatgaacatcgacgacatcgccgaagagagcgttgcaagcaccaagtaacgcagcgggtctgagcccgcttgcccgcaccgcccgccgcaggcttgctgcggcgggcgggcggtcggccgcgagggcggccggttcgctttcggatatgcgcagctgcgaagcatatccgaaagcgaaccgtacggttgacgcagcgaacccgttggtaggaggaagcatgatctgtccgttttgcgggagggtaagcgattccagcgagcattgcacccgatgccacgtcgagttcaatgacgagatccgcgctgtcgcgcttaaggaagatacgcgcagcgatcgcgtcggccccgtatctacgaaggctgcgaaggtcatgctgtgggcgttcatggctttgctgctcgtcgcgtttgtcgtggtgaccgagttcggctcctcttggtggtcttgagaccgggcttcggcataggggcggctcgccggttgcgttctcggaccggtgggccgcccttttttcaagtgtctccggctatcgggattcgggtttttcgcaatcctcgaggggcacatctcccataccggccgcccagagcatgtaggcgttcatgacgcggtcttgggcggctatgccgctttcggcggttttcagatgtcgaaacgtatcgttgattagctcgacatcgtaaagctcgtacgggtccgacctcagccgcttcgagacgagcacggcgggaaacgtgtttgcggcgttgttgtagatcgtggcgaggttgttgtaggcgagcgtgcgctcggctgtgctttcggctggggcgcgtgcgagctcttcgcgggcgcgatcggcttcggctgcaagtttcgcaaggtttttgcaggccagccaaagcgcgacgagaaaccccgtcgcaacgacggcggcaagtgcaatgaaatcggcgatcatgggcggtttcgctcccgtctgtcgaggctttcgggctttatcggatgcggtgcgatctgatctcctcgtcggtcacgatgcacgagcggcgaatctcggcgattttcttgccgcttttcgtgaagtctatgctcgatgtgccgccgacgatggcgagcccgaacgcgcagagcatggtaacgccgcctgcggcgattccgttcgggtcgatgactccctgcgcagcgagaagctgcttgcccgcaacgaggacgatgacccccgcgagagccgctgcgcacttgatgacggcgacgcgccttcgccccttgagccgcgtgatctcgtcgaggcagcgcgtcttccgcttcgatgggttctgtgccatggtatcccccgatctccgtgtggccgtcgggtgtccgtaccgagcacccgacggcgcgtcttttcgctatgccggccgttacgccgacgtgcgcttcttgtcgagtatcgccatatcccgattccacattctggaaaacggcagtacattgagggccgccgcgatggaaagcgcggccatgacggcaaacacgccgagcctgttctccgctccgcccacggcaacgccgaccacgatgttgagcaccgagccgaatgcgatggcgaagtttgcaagcgagaggttcagggggtagttcttcgagccgaaccgctgccgagagaaagccgacgcgacgacgggaacgccgccgtagcagaagccgcagcagaacgcaccgacgatgtagagggccgagacgccggtggtgaaggcgccgacgatgcagagcgtcgcggcaacggcgacgagcccgtcgatgagcatggtggtcttcacgttggtcttatcgtagatcatgccgatgacgatgcgcgccagtccgttgcaggtggaaacgaggccgacgagcagcgtggcgaatccggcgtcgatgccgacgagctgcgcatcggatgcgcagttgccgatggtggcgaggccgatggcgatcacgacgatcgcccagatccagtacacgtagaacaacggcgtcttgagcgcggcgtcctcgtcgccagggtcgtagccggttgacgtcgccttctcgggtgccatgagcgaaacgatggtgctcggcggccggttgagcaccagggccagcgccagcacgacgacgaaggttacgaccccgatggcgatgaacaccgttgcgagcccgagcagcggaaccaggttgactgacagcgtgcccaagatgagcgagcccagcccgaatcccatcatgagcacacccgacgagaagccgactttgtcggggaaccagacgtttgtcgttgcgacgatcgtgttgtacccgattccgacgccgagccccccgagcacgccgtagaacacgtacaggacggcgatgctgccgttgccgagggcgccggtgcccgcgaagccgagcagaaagagcgccgcggcgatgatgagcgagggcttgacgcccaggcgcgcatcgagctgcgatccgatgaccgcgccgacgcagaacgtgatcatcatgatgttgaaggtgaggccgaccgctgccttgtcgagcccgaacgaattcgttatgggagctgcgaacatcgagaaggcgtaaatgaggccgaggaagagcagggccagggtggagagcgccaggtaaacggtgcgcctgctcttgatctggctgatggacaaatcggacatgaaatccctcgcttaatcgttgtatgtgctgatgagcggcgcggatgcgccaagatttccccagtatatgaaagcggccttccgaagaccctatggcgcatgcggtatttttcacgggtgcggaggctgatgtatggccgcgagtactagatcgccgtttttcatacctgcgaggggaggggccgcgcatgcgcggtgatagcgtggagcgaaaagacggcggcatcgttgcgggtgccggtttgcgacatcgcatgacgaatggggatgagtgctgtggaaattgcaacgcgggaagccggcgagggcgtgctgcgcatgacggtgacgattgcggccgacgagatggccgagcgcatcaggaaggcggccatcgtggtggccttccgaagcgagatcgcccccgaccccgccatcgcgccccaggaggcggttgagcgcaagctgggctgcgacgaggcgcaggcgcgcattgccgagcaggtcatgaaagatgccgttccgttcgcgctgacgcaggagcgcatcgacatcgtcggatcgccgacatttgtctccgctcatcaggcgagtgcgggcgagcctttcgagttcatcatggagtgcgtgccggtgccccgtttcgagctgccttcctacgctcccgtctcgataacggtgcctcccgcgcgcgttgccggcgatgccgtggccgaacggatcgcggcgattgccgagcagcatgcgacatgggaggccgattctgagaagagggcggttcgggcgggcgatgtcgtcgagctgtcgatggagacggagaagaacggcgagcgcgtggcggggctttgccggaaatcgaatcggtacacggtgggctccttcgccatgcccgatgcgttcgacgaagcggttgagggcatggaggccgggcagagcagggaagtcgtctacgaggggccgagcttcgagaccgacggggccgggaatccgattatggaggagtatcgctccaggattacggtgaagcgcattttgaagaaagccgtgcccgccgtgagcgattcatgggtggccgccaccgttcccggatgcgctacggttgcagagctcgaggctcgggttcgcggctcgcttgaggaggaggcccgatcccagcgggcaaagcaggttgagttcttgtcggcgagcgagcttgcgaagcggttcgatgcgcgcattcccgatacggtctacgaggcggcgatggacgaggcgaaacgagagttcgctgcgaagctcgccgaagaggatacgaccctcgaggattttctggcgcagggaaacgtggacgaacggcagctgaccgtttcgctcatgatgcaggtgcgcgagcagctcgtgcaccaattctcgctcaacgcgcttgccgagcactacgggctttccgtcgacgactccgatatggaggcgttcttcgaaagcatcgcgcctggcagggcgatgcaggcgcgcctcgatttcgaacgctcgggacgcctgttcgccgctcagcgcgctgctttgcgtctcaaggctaacaggcgccttgccgccgaggcgatcatcgacgagttcgacggggaagggatcgggtagagccgtcgtgggcgggagcggtcgcaacaggtatgccgtgcttgcggtcggcacggcgacgatgctcatgttcggcaccatatacgcgtggtctatattcattccgccgcttgaagcgcagttcggatggacgcgcagccagacctcgatcaccttttcgatcgccatgatatgtttgtcgctcggcatggtttcggttggcgagctgtcgaagcggttttccctcaaggcctgcttcgtcgtttctacggcgcttatcgccttcgggctgttcatgtgccgttcggttaccgagttgtggcagctgtaccttttctacggggtctgctgcgggttcggatcgggtatgagctacaccgtgtggaccaccaacgtgctcgcctggttcggcgacaggatcgggtttgcgagcggcgtgctcgtcatggggttcggcatgggcgcggcggtcctcggcacgttcgcctcttggctcatttactctccgctcggttgggaggctgcgtttctcgcgatagcggccatcgtcgttctcgagggactcgtcgccgtgcgctttatcgcgtcgcccccggctcgaatagccgcgcttgcccccaaacgcgacagggtcggcgtgaatctgcccggctcccgcgtggtgcgcgaaccgtcgttttggttgttctgcatctggcgaagcttcgttatgggtctcggcggcgcgataatcgccgaagcgtccgtcatgatggcgggaatcggatcgagcgtggggctcgcgacgttcgccgcgtgctgcctcggggcgggaaacggattcggccgcccgctcggcggcgtgctctacgataggatcggccagttcaagacgcttgtcctgctgcctgcgtgcgcactcgcggtttcggttgccatgatcgcagcgtacgtgtttcgaatgccggagcttcttgctgcggcgctgcttctcgagggagtgctctacggcatgtacgcagccatcaacacctcgtatatgcgcaacacgttcgggcaggagcatcttgcgatgaacacggggatcagcgccgttgtgctcgcgccgttcaatctggtgtttccgctgcttgccgccgccatcttcgaggcgagcggcgaatacctcgcattcttcctcatcgtgcccgcgttctcgctgctgtcccttgcggcgggagccctctgccggccggcgaacgagcgactcatgaagcggtgtcgcgcggaaacggccgaggagatcgggatcgaagcggaaggcgggctcggggatggcgtttcccgggcgggcgatggcgcgccatcggcggaagggggcgttgatccatggcatggaacgccgatcagataacgaaacaggccgttcgcagcgctgcggaggactacgcggcgttcgaggctatcgggcttgagcatatgagcggcatccgggtgctcgatgcggggtgcttcgatgggttcaacacgcatctgaagtttgcaccgtatcggggcgttgcgtgggtggttggaatcgatccatcgcgtgcggcgatcgagagcgctcgaaaaagatacggatccgaacggttcgagttcgtcgaatcgtcgtttgaggattacgccgcacgggacggctcgttcgacatcgtgtacctttcccatgcgctgcagcatttcgacgaccccgcctgcgcgcttgcgaaggcccgtcgattgctcgcacccggcggcttcgtgatcgtgaaaacgacagacgacggggcgaaggtgtcgtatcccgaccccgacaaggcgatgagggggctgttcgatctgtacgaacgccacgtgctgcccgaaacgccgtggacggcgcataccgaccgctacttcggaagaaaatgctacacgcttctcaagcgggccggatttgcgagtgttgccatagcggcgttctccgataacaccgccgggaaaaccccaggcgaacggcgcgcgcttttcgagcggtgcgcctattttcgacgaaacgcccccgagggatcagatccctccgttgtgcgagagatccgcgaggccgttgagcgcttcgagcgtttgttcgagcgggacgactacttcttttcgacgacctcatacgttgcgatcgggcagaaggtcgagtcgggggcggagcccctcgcctatttcggaagcacgttcgggcgatgcggggaagccgtttgccgcgaagttctgccgcccttgcgctccgacggcacgcgcctttcggtttcgacgggcgattcgggcgtgcgggcgattcgcgccatgcgggagggcgatatcggcggcgtcatgctgatcgagctggagtcgtttcctcaaccgtggacgccgcttgcctacctgtcggaactgcggcataacccggctgcccgataccgcgtgcttgtggaggagggcgtcgttgccgggtatgtggggatctggtatcgcggcgacggcgcctggatcacgcgcattgccgtaggatctgcgtaccgctgcggcgggcggggcggggaattgctcgacgcggcttgctcggatgctgccgagcgggaagcgggggacgtgctgcttgaagtgcgcgcctccaacgaggatgcgcagcggttttacctgcatgcgggattcgaggcggtcgatcggtggaagggctactacgcggacccgcccgacgatgcgatcgtgatgcgcaaggctctttccggcgcatccttgccaaaacagtaaaacgagggcttggatgcgtgcccccatccaagccctcagtgtttcagaccgatactattataagacataatctagtaattggcaagagagaaggagattgcctccgtctttgcgtcatgggaaggcagccttgtttcagggaagggcggcaagcgggcgggcggcttgtgccgatggatgtcgggcgcccgcttgtcgagcggtcgaacgggcgcccggcggtcggtgcgttattcgtatttttccgcagcgatttcgagctggtcgatgatgtcgatgctttgcggacacatctgctcgcatgcgccgcatgcgatgcatgttgatgccggccctgcagcggcttgccaggaatagagtcccttgacgaactcgtgatcctccaccatgagctcgaggttgagcaggctcaggatctcggggattttgactccctgagggcattccttcacgcagtaccggcagttcgtgcacggtaccgtgggcacgctcttcaacgcggtgatcgcctcgtcaagcgctgcctgctcgtcttcggtgaacggtttgtccgctttgaagctcgctgcgttgtcgcgcacctgttcgagcgtcgacatgcccgccagcacggacaccacgttgggcaggtgccagcagaagcggtacgcccaggaggcgaggcttgcttcggggttcgcctcgtgcaggatctgggccgcgcgctcgggaaggtcggcaaggcgtccgccgcgcacgggctccatgataacgacgggcacgccatggcgcgccgcgacttccatgcagttgcgcgcttcgactaccgggtcgtcccaatcgaggtagttcacctggagctgcacgaaatccatatccggatgcgcggtcaaaagcccatcgagagcttcggcgccgtcatgcatcgagaagccgatatgcttgatgagcccctccgccttcttttgccgggcgaactcccacatgccgtattcgtcgaatcgcgcggtgcggttgcctccgacgttgtggagcagatagaaatcgatgtagtcgaggccgagctgttcgagcgaggtggccaggtttcccttcgcctcctcttcgctgtcgatcgcccaagcaaggcatttggtcgccaccgtgtaggcgttgcgggggtatcggtcgacaagcgcctctttcacggcgcgctccgactcgccctgatggtacacgcgcgcagtgtcgaagtatgttcctccggcatcgatgaacgtatcgaccatctgcttgaactgctcgatatcgatgctggtctggtcttcggggtcgagcaacggcaggcgcatgcatccgaagccgaacttcggaatcgattcaaactcttgtttcatggggctcctctcataatgttgcgatcctatcctaattcttggagttcactccaagtcaaggggcaattcggaaaaacgcataaacgagagccgaagtcgtgtcgatcggttggcttgcggcttcgctctttgcaccaagcgggtgcaaagagcgatccgaatcaaaaaaagcgcgggagctttgcagctgcccgcgctttgcgtcgaaggcgcagacctacgccgtcgatcctcctcaactgcttcccgcgccggcgcagcatgcgtagcagtggtttccgaaccgtatatcgcgttcgagcggcaaagacgcatcgttcgcataatctgcgatcgtgagcttggcggtacatggcagctttgctgcttggttgaaatcgcagtcgaataccgtgccatcccagccaaccgaaagctggctcctgcacatcatcgcgcttgcggtgtcgggattgaacgccgcgatgagcttttccatgtacggcttgaggttccccgtctgttcaaggcggtttccgaaacggccgagcggattgttcgcgatggcaaacaggttgttgaaggcgatgccgaagtccgcatcgagcttttgcctgtactcccgctcgagcgtttcctggtcagggggaagaaacgcgcctgtcggattgtataccagatcgagctcgggtccgcctttcgagccgtatccgagttcgttgaggcggcggagcatcctgatcacggggtcgaacgatcccgctccgcgctgtttttccattgtccgctgcgaatagtggggaagcgacgcgacgacggttgcgccgagatgggcgtagacttcgggcagatgctcgtagccgggttcctgcaagatcgcaaggttcgatcggactattatagtgccgtctttgcgagcagcctcgccaaggaaccattcgaaatcaggattcatttcgggagcgccgccggttatgtcgagagtttcgaatccgcggctgcgatagacctccaaacactgctcaagcgtattccggctcatgacttcggtgcggttcggtcccgcttcgacatggcagtgtttgcacgcgagattgcatcggcggctgatgtttacctgcaaaacgtcgagttcgctgttcgtgcggcgataaggctctgccacgcgttcgacaaacggggaaaacgaatcgagcgttgtctgggcggatgcgcttgcttcgggcatgatctacatttccaggtttttgacgatgttcttcatctgcacgccgtggacgagagctgcgcctccccggatggcgttggccacgtggaacgcttcggtcatctgctcttcggtgacccctttttcgaggcatgattgagtgtacgagtcaatgcagtacggacattgcacggcacctgctaccgcgagtgcgatcagcgccttttcgcgtgctgtaagcgctccctcttcgaacaccttgccgtagtaggccatgtagagatcccaaagctcgggcgcctcttctcccatggtcgagaatttgccgagatcttcgggcttgtagtaggtttccatggctgcgctccagtcggttcgaacggaaacattggcttcgccaatgcatataagactattgcatatagtagacataaactaataaaaaagcaagatttgcgagcgggggatcggctcgcatgaaggacgtttgcctgcgaaatccgcgcctggtgcgggggtttcatttgcctttaagcgccgtgccgtccaaggggcatcccttgttgcgcggggcgcgcttgccgcgtaaagcgcgcttgtcgagctgtcttgtgcggcggcattcgcctgccggatgtcctgcgcgcggttgcgtcagatgggaagcttcaagccgtcgagggcggagcgcacgcgcccgtcgtattggtcgaggtacgcctcaagttcggcgagcgtcacgggttcgtcgtagtgcatggcgagatgggttaggtagatcgtgcccgcttcgagttcgagcccctcctcgatcgtttcctgcacgctgtgatgcgcgtcggggctccaattgcgcttccagaaggtcgcatcgagaatcaggacgtcgacgcccttcacgcgctccgctgtttcgcttggcagcctgcccgagtcggatgcgtaaaaaagcttggtcagcggcgtttcgatgaggtagccgtacgttcccggcgcgtgggttgcgggaagcgcggtgtacgttgcgccgtcgaactcgatgctgtcgaagggcttgagctcacgggcttcgaggcagtacatcatgtagccgaactcgcggccgatgccctcaagcgcatcggcgcttgcgaaggtgggcagcgcctgcttcgtgacgagctgcaccatgtactccagctcgccgaggccgccgatgtggtcgaagtgcgcatgcgtatacaaaagctgatcgaacgagcgcacgttttcgcgtatgagctgatggcgaatgtcgggcggcgtgtcgatgacgagccgcttttcgccctcgatcatgacgccgcaatcgccgcggcgcgcccgaggatcgcggcgcgcttcttcgcaggcaggacagtcgcagaagaaggcgggaacgccgcagcccgctcccgtgccgaggaacgtgaaggtgtgggacatctgagttcgttcgtcggcgctttcgggtatgtttgtcggatcgctgatctgccgttcggtgcgatcggtgctcatgggtgcctcgcttctgcccggtatcgttttctagatagtataaacctcgggcgaccgcttgcttcggaaaggttgtgcgcgggggaatgcgtgttgcgctcccgaaagctcggtttgccgctgaaccagcgacgacctggtgttccatggtttcacgcaggcgaccggtcttcgctcggcggcgggaggaccgaattctggcacaaaattggacctgtggcaatttgaaaataaattacataaataaattcacccgaaatttctgaaaaatgcctgatggcgaaaaatccaaacaacccataactattatatagtaggttatattttgccacaggtccaattttgcgccagaaataaggcattcacggacagctcgcctccatggaagcgcgcatccgcccctgggctggcctcccgtctttcgggttttgctttgcctgatgtcgcgctcgttcaatcgcagccgcccgtttttctttgctgcgctccttgcgcccagctcgtcccgcatgcccggtattccgaacgccgccccgctcgccatgcgtgttcgggctgggaaacgccgtgtcggctcgtcgattgcgtttccggcactcgccattttgccgacggctgccgtcttgcggcgtgttcggggtgcgcaaaccgcttcaggcggtcttttcgtcgggcgctcggtaccagtcgcggaagcatcgattgcttcgttcatgtattcttgactcgatattatataatggatgccgtccaataggagtattggtcgcataatggagtcaggcgaatgtgtcaggaggaaacgagagaatcggatccgctggacggatcaaggcgacgggggtgaccggtgtccggtcagtaggccgaatacgatcgcgcgtcttcgcttcgggtatcgagcgggcgagtggccgatcccgttccgcgagcggtgtagtccgaatttggggaattctgaattagtaccgataggcttacctcgcatgctggattaaatcttccagtgtgatgtatgcgcttcggggctcccttagactgggctcggtgatccgtaggattctcttatccgcacgctacgtgtcccattgtgcgaatgtaattggaaagacgagtagaggggaaggtagatgacagaaatcgatatccatgccgatggcgtcgagatggttaagtcgctctgctatttctgccatgcgaattgcggcgtccttgcctacgtcaaggacggcgatgtaatcaagatcgaaggcgatcctgattattcgaaccacggcgggttatgctgccgcggtacgagtgcgctcttgcatgtcaaccaccccgcccgcatcaaccatgcgctcaagcgcgtaggcgaaaagggcgaggggaaatgggagcagattccatacgaccaggcgatccaagaggtggccgaaaagctcaaccagatcaaggctgaaagcggagcggaagcggttgccacggccggcggtacaacgcgcaccgacgactgggcgcgtcgccgctttctcaaccagttcggttcgccgaacggtttccacaacgcgcttctgtgctggatcccgacgttcatggccgagacctgcgtggctggctggtcgccgttcgagaccgatctcggcggtgcgaagtgcctgatcctctggggtatgaatcccggcgcctccacgcttggcggcatggacggctacaccgacctgcagaaggccggcttgaagatcatcgtcgtcgacccccgctattccgagacggcttccaaagccgacctgtgggtgccgctgcgccccggatccgatgcggcgctcgcccttgccatgctgcataccatcatctacgaaggcatgtacgacttcaacttcgtgaacgaatggtgcgatggattcgacgagctgcgcgagcacgttaaagactacacgcccgaatgggccgcccccatcacgtggctcaagcccgaacagatccgcgaagtggcgcgcatgtacgccatgaaccgtcccggctgcatccagtggggctgcacgtgggaccagatcggccgcgcttccaccaccggcagccatgccatcgcgctcatccgcgcggtctgcggcaacctggatgttcccggcggcgacggcatgcccggtccctcgctcggcttcttgaccgacgaggaaatggaggccaacgaatgcctgcccgaggagcagaaggcgaagcagatcggctccaacaagttcaagcttacctcgtggcccggctatcagctcatttccgacaacgcgaagcgcacatggggcaagacgctgcccaccgagtggttctgcgaggctcacggcccgagcgtgttcaaggccatcatcacgggtgatccctacccggtgcgcgcgctcatcgtgaacgctacgaacccggtcaattcctacggcgatgccaagatgacgctgcaggctttgaagcagtgcgaattcctggttaccgtcgattactggatgaccccggcggccctgttctccgactacgtgttcccggcggccggcgccctcgagcgtcctaccatcgtgacccactacggcgcaaccgactcctttatgggcggcaggcgcgccatccagccgaagtacgatcgccataccgacatgacgttctggcgcaagcttggtttggcttgcggccaggatcccgagatgtggccgtgggagaccgaggaagaggcgtactaccacatcctcaagcctttgggcctctccatcagttgctataacgatttcgtcgattactaccgcatgtactacccgccgctgcatcagaacaagttcatcaccaacggcggcttctggactccttcgggcaaggtcgagtgcaattcctccatcttgcgtcagctcggttattcgggcatgcccacctatatcggctgcatcgaaaacgagatcgatacgcccgagatcgccgaggagtacccgatcgtgctcaccacgggcggcggattcatgccgtaccatcactccgagcacttccagatggaaggcatccgcttcctgtaccccgatccgtacttctccatcaaccccgaacttgccgaaaagctcaagatcgagtacggcgattggtgctggatcgagacgcgccgcggccgcatcaagatgcgggcgaacgtggagcccgaagtgcatccgaacgtggtgttcgcgccgcgcggctggtggttccccgagcgcgacggctcggccgatctcgacaaccccttcggctgtctcgaatccaatgtcaacgtgctcacctcggtcgacgactgggattgcgatcccatgggcggctcgtgggcgaaccgcggccttatgtgcaaggtgtacaagtgcggcgagttcgacaaggagtacaagccgtccgatacgcagttctccattcccggctcgtcgaaggagccgggcgtgacggttatgccgagcgatcagcatcttgctcgcgagcccattccgttcgaggttccgcagcctcccgaggaggttcccgagggctacgagtgggtgtggcagagcggtaacctgtatacgaaagacacgcacttccgccttgacgaatcgggctggctcatcaacccgaggaccaagggataccatgatgcctacaccggctggcgctacgatgcggccaacgagtgcctggtcgacgacgagaccggcaagatgtacacgatggaccgcgaggagatcccgttcgtggcgggcatccgctgctatccgggttccgaagccgctccgtacgaggttcccgagcagcttacctgggatgttgcgaaggggcacgccgtgcttggtgatctcgccttcgtctacgatcccaacagcggatggctcatcgatccggaaacgggtgcgttccacgatgcctactacggctacacctacgatgccgagcgggcctgtttggtagacgaggcgagtggcagatgcttcgacatgggctacaacgagctggttgccgaagagcccgagccggcaagcgaagaggccgcgcccgaaggtgccgccgcggccgaggaaggagaatagacatgacacggtacgtgatggtcatcgacaaacgtcgctgcatcggctgccagtcgtgcacggtcgcttgtcgcacgtggaacgacctgccgttggatattgtgtacaacccggtcgttaccgagggaacccagggaacctggcccaacgtgcaccgcgattggactccgcttctgtgcatgcactgcgccaatcccgagtgcgttccctgctgccccacgggcgcaagccagcaggacgaggacggtacggtctggatcgattccaagaagtgcatggcctgcaaggtgtgcgtgaacgcatgcccctacggcatgcgcgacgcatcgcatctcgaacctcgcctgcatcgcttcgtgcgcaagtgcacgttctgccgcgatcgccgtcagatggatccgagtgcgaagccctactgcgtggacacctgccatcagaaggcgcgcatcttcggggatctcgacgatcccgagagcgaggtttcgaagctcatcggttcggtgaaaacggaacgtcttttcaccgaattcggtaccgacccgcagatctactatattcccgagttgggaggtaaggcgtaatgaaacatcattattgggagatgccgatcgtcatctatctgttcttgggtggcctcggcggcggcatcatgttcctttccgccatcttcgatttcttcatcgcaccgggtgcaggcgtgctgttcgcgtggccgatgttcatcgcgctggctgcgctcgccgtcggctgtttctttttggtgttcgaactcggccagcccctcgtgttctggcgcgtatggaccacggcgacggccatcatcaagtggggcgcaacgcttttggtcatcgccatggtgttcggagccctgtggtgggcatcgtatctgccgtgggaatggatcagcgggctggctggcgttttggctggcgggcgcggcgcgttcctcgctatcgcgggctttgcgggcttcggcatcatggtgtacacgggcgtcatgctctccacgttgaaggcccatgcgttttgggcgactccggcgcttcccgtgctgttcacgatttcggcaacctccaccgcctgcgcggcaatcgcgctcggcttgggcggctggccggttgaattcagccttgaggcagcggtcgttgcggagattatccgcgagatcatccacgtcgtcgacatcgtgctcgtatgcgccgagatcgtggtgctgctcatcatggtgctctcgttcttcggtgccggcaacgtgacggccaaggccgtggcgacccgctgggtcaagggcaagaccgcaccgctgttctggatcggaatgcttggattcggcttggtcattccgctcatcctgtacgtcggcggagctcattccccggcttccgaggtggttgctccggtgctggtcctgctcggcggtttgctgctgcgctacctgtgcgtctattccgacgagcgcgccgagattccgggcgagaaccgctactacaatcgcatcgccaagggcgacgagaacttcgtttccaaatggcgcggcaaggagaacctctactagggtatctcgtcgatcgacacagaaggccggtgcggctctgcgccgcaccggccgattgggaacagcatttgctatgatgggaggcgccggatgatttcggtgccttctaacggatgggagcgaaaaccgtggatcgtacgatcgtgcatgatgcgttgacgggaagcgcgatagcgtttgatgagcacgcgtgtgttctgctcgacggggcagaccagacgcatgcccataccgctgcgcgatcactgttctttccgggttgctcggtcatcaacttcgcgccttcgctcatgggcgcggtgtatgcgatgctcgaaagagcgggtgaggccgatggcatctcgcttttatgctgcggcaagctgcttgccttcgaacccgatgccgaaaacgtatgccctgccttcgaagccgatctgctcgcatcccttcgaaacgccggcgtgaagcgcgtcatcacggcgtgcccgaactgcacggcggagctgaggcgggtgcttgcgaaaagcgaggaagacctcggcatcgaagtggccgttttgcccgaggtgcttggatcgtgcggcatcggggtcggcgaagaagccgtgcgttcgttcttcgacgaaaacggcatggcatacgcgggggctgcgccgaagctgacggtgcaggattcgtgccccgaccgcaaaaccggggaattcgcgcgcggtacgcgcagcctccttcccgccggatcggtggtggaaatggagcatagccgcacggcttcgatgtgctgcggatctctggccaaggctgcgggcaaaaacgacgccgcgacacggcaatcgcagcgtcgcggcgaagagggcgttgccgcaggcgccgatgcgatcgtgacggcgtgcatgagctgcgcttcgcagctgtcgaacttccaggatgcactgcccgtcatccactacctcgagcttttgtgcaacgagcgcatagattgggcgtcgcttcctccttacttgcaggtgaggtttcttttcgagacgcattcgggcagacgcgattaccgtgggctcgccgatgcttcgcccggttgctgcggcgccgttgcggccgattgcgccgaggcgtccgaagcgggggagtggtaggcatggtgcgcgaactcaagcctaccaactgccatttctgcgggtacctctgcgcgtttaccgcaacggtggaagacggtcgcgtggtagatctcgagcccgatgttacgcgctatccctacgacgagaagatcgtcaagggatgcaggcgctggcgcatgaacctcgatgtgctcgaggacgaagagcgcatcaactaccctctccgccggacgggcgagcgggggtctaacgaatgggaacgcgtgagctgggacgatgcgctcgacgatattgccgagcgcttgcgggctctggcgaaagagcacggccccgccacgcttgcgagtgcgatcggggggccgcacgcgtcgttttggccgctgcaccgctttatgagcctgttcggatctcccaacaacatgggcatcgggcagatctgctggaatccgcgaatctggatggatgcgctgacgttcggctggacggtggaggcggatatcgatccgactctcaccgaagcggtgttcatatgggggacgaatccggcccagtccgacaattcggcgttttggcgctcgctcatcggcatttcgaagagcgaggtgccgcttgtggtcgtcgatccccgccgaacgcaggttgccgcgcgggccgatctgtggttgcctatacggccgggaaccgattgcgtgctcgcgctgggactcatccacgtcatcgtcgaagagggtctggtcgatcgcgacttcgtcgaacagtggtgccatggatacgacgagctggtcgagcatgtgaaaccctacacgccgaaagccgtgggccgggtgtgcgggcttgcgcccgaggatatcgagcgggctgcgcgcatattcggaggtgccggtgcggcggttctcgtatcgggacgcggcgtcgaccagatcggccccgacgtctccccgacccatcgcgccatctgctgcttgcgggcgatcaccggcaacgttgacaagcggggggcttgcgtgctcgccgaaatgagcgatttcacgcccgaggtcgatctcgaaatgagcgctcgcatgaccgatgagcagagggcggcgtgcctgaatacgccctatacccccttgcagtgctacgaaggctacgagcgggtgcggcgtttgaccgagaagctggggcggcgcctgccggtccgctaccttacctcggcgcatcccgaccttgtgctcaaggccatgatcgagggcgacccgtatccggtgcgtgctctgatcgtcgaagccaccaatccgctgcttacctacgccgacacccatcgggtcttcaaggcgctcatgtcgcttgatctgctcgtggttctcgaatactacatgacgcccacggccagcatcgccgactacgtgctgcctgccgccggggcgatcgaacgtccgacgttccaggctcacggaggtgtggcgaacatcgcttacgggggtcctgcggccgtcgatccgtactacggaagaaagaccgactacgatgtgttccgcgaactcgggcttcgcctcgggcaggcggaggattggcctgatgcgaccctgcaggaagcctatgcccggacgctcgccgaggcgggagtctcgtgggaggactactgcacgacgggtttgtactggcgcccgcccgcctacgaaaagcacaagctgccgggggccgacggcgaacctgcgggattcgcaacgacgaccggcaagatcgagcttgcctgcgaagtcctcgatgcgctcggcggcgataggctgccgtcgccgtcgccgcgattcgcttccctcgtgacctcttgcagcctcgagggcgaagagccggcaacgggggcctccgacggcgcgtctccttctggggcggcggatcgaaacgacggcctcgtcctcatcaccggcgcgcgcaagcagccctacaacgcgtcgatgttcttggcgaacggggatttcagggagagctatcccgatccgttggttgaggtcagcccccggacggccgagcgccttgggctcgcctcgggcgatcgcgtgacgctctcgaacgaaaagggcgaggcaagctttatactgaaaacagctcccatgcgcgacgatgtcgtgagtgccgattacgggtggtggtatcccgaaagagaacccggcgcaccgggtttcggcggcatatgggaatcgaacatcaacaccctgaccgactgctcggtggcagacggcgaggcgatgataggaacctggtcgtacaacgcgattcgctgcacgatcagaaaaacggacgaaccgacggcgtgagccgtaaggtcgagacgagatgtgaggagtcatttcatggcggaaaagaaacacgccctgctcttgttcagcaagcctccgattcccggaacggtgaagacccgtttggtggcaagcgggccgttctcgaacgagcaggctgcagagtttttcaagaggagcctgttcgatgtatccgagctctgcatgcaagtgctgcttgaaatgcaggctgaaaacgacgaattggtggcgagcgaccccgatgcgacgaagatcacctacgacttcttcgtatccacgacgcccgccgacaacgtcgagataatgaaggcgacgtacgatgagatcgggccctggccgatggagatccactacctgaccgacaagggcgcgactttcgacgaccacttcgacgatgcgttcgcccagatattcgctctcggctacgaaagcatcgtctcggtcggcggcgacatacccaccatgccgcgctcccatgtgtcgcaggcgttcgcgtggctcgactacttccagtcgcttggaacgccgggattcgttcaggctccgtgtcaggagtgcggcacctcgcttgtcggtttcagccgcaacacgccgatcgatcaccagggcgtgtactacaacaccggcgggcgtccggcgctcgacggctacgtggagaagctccaggagaaagacatcccctcggcgtttctctcgccggtgtccgacgtcgacgagatggaagatctcgcccatacggtttcatgcatccgcgccatcgcgcaagcggcgaaatcacagccgggcatctacgttccgcagcgcgtgctcgactgggtcgatttcatcggcctgcgcataaccacgccgcccaatgaaaaccacgatcctcgcaactacatcgacgaatagaggccgatgatggatcaggcagtcgaaagaacgaccatacacgcaacgacggcgctctgccctcagtgtttgcgcgagcttcccgccaccgtgtacgaagaggcggatggggccgtgtggatggagcgcacgtgccccgagcacggagagctcgcgacgcgcatgtggcccgacgccgaccactaccgatggctgcgctccgaggcgttcgcgaaggtggcgccgcagaatacgacgcctgtttccgggccgtgcccgttcggctgcggcacgtgcggacgtcacgagcggcgcggcacgctgctcgagatcgaggtgacgaggaactgcaacctgcactgtcccgtgtgcttcgccagcgcggtcggcggagaagacgatccgtccatggaggagatctcgaccatgtacgacgtgatcgcgaacgcggtgggaaccgatggcgccgtgcagataacgggcggcgagccgacgtgtcgcaaagatctgcccgagatcatcgcgctgggccgccagaagggtttctggggcatcgaggtcaacacgaacgggcttgtgatagctgcgcgcgacggatacctcgaagagctcgtggctgcgggtctcactggcgtgtacctgtctttcgacggtcttacgggcgatgtgtacgaggcgacgtgcgggcgcgatatcctggataccaagctcaaggtgatcgagcgttgccgcgaggtcggagttcaggtggtgctctcggtggcggtcgtcgccggctcgaacgacaagcagctcggcgatctgctgaggttctcgctcgacaacgccgatgtggttgcggggctcgccctgcagccggcgttcacatcgggccgcttcgaggcgaagcgcgccatgcccatgtcggcgggcgatgttatcttccagctggccgaacagtccgatgggctcatcgccccctacgacatatggccgctcgggtgttcgaacccgctgtgcgatacgggcgtgttcctcgtgcacggcgaagcgcccgagggcgttgaggcgcatccgtcgggattctatccggcgacgcgcgcgatgactgtggaggagtaccacgccggatacagcccggatagcccgcagggttcggtgttcctcgacattttggccaagcgtggcgtggaggtgaagagcggtctgtccatcatcgtcatgaactacatggacgccgtgtcgatggacacgcagcgattgagggaatgcagcatgatggttaccgtgcccgacggtcgggcgattccgttctgctcttaccatctgaccgatgcggcgggcaagcgcgtctatccgccgtggtgcaaagaagagctggcgtagaagagccgcaaggcgttcgccttccctgcgggaatcggaatccgcagggaaggcggtccgaaaagacaaggcccgcatgcggcgggcacccggtcggagccgggagaagacgagatgaggagcatgagcctatggcttcttcagatgatacgaacgttgggtacaaggtccatatagaccgcgccctgtgcacgtcatgcggcctgtgcgaagcgttctgccctgtaaacgtgttcgagatgaacgacggcccgcaggccgttcggcccgaggattgctggggctgcgagacgtgcgccggccaatgccccgttcacgccattcgcatcgaggcgtctcctgcggcgaaagcggccttcgaagagcgcgaggtagctgcgccgctcgaccccgagatcaaagcgcggtacagggaatgggcgcaggttctgaccgacgtcctcggcctgcgctggcatcccgttgccatttcgcttgtcaaagccggcgatcccctgcccgacgtgccgatgcccgaagagcgcctgcggttctgccaatcgctcatggcggcgaggcgcgggcgttccctcatgatgcccgcgaatcgacatgcgtgccccgacggcacctccattctggggttgactcccatgcccgagaagcttgcgagcggcgaactctacatcctgttccataaactcgattcggtcgaagcagctaagcgcatggtgcacgagcgtccgtgcttgccgccgcgcacggtcgatgcaacggttgtgacgccgctttccgatgcggcgtgcgaagccgaggtcgtcgccatcgtcgcgcaacccgagcagatcatgtggctttcgatggccacatcctactacaccggccatcgccatgattttcatgcgagcggctacaacgcccagtgcgtcgaaaccacgcttctgccgatgacaacgggtgagatcaacatctcgtttggatgctacggatgccgtgcgagctccgatgtgggcgacgattgcatgatgatgggcattcccgtaagtctcatgccgcaggtcgtcaagggcctcaaagagctgggcaagaaagctatcccgcaatctcgggataaaatctatttgccgcccttctaggatgcgctatggatgaactgataacaatcagacctgccgaagccgatgatcttgcgaccatcgaggcgtatgcggccctcgagggcatggggccgatcgaatcggtcgagaacattcgcgtggccgtcaacggcgatggcgatatcgtagggttcatcaggctcgtgctcgacgcgcagggcgtgtgccacgtcaaccccgtcgtcgtgtactcgacatggcgcggctacggagtcggtcgcacgctcgtcgaggatgcccttgaggaatacggcgagctgaggttggtatcgcgcggatcgagcctggcgttttaccgggcgcttggattcgagcccgtcgaatgggggagcatacatccgcccatcgccgccgaatgcgatggatgcgagctgtacgacgaatgcgggcccgtgccggttcgcaagcgaagcgaaagcacgtgcggcgaggctagccgaaaaacgtctgattgagccaagggccgtattcgcctgtccacatagagccgagctgatcgaagatgtcggcccagggtatctcttttccgaacagcagttccaggtagtggcggttttcgatgccgcagccgccgggagtttcaaggcatgcttgggcaaccgtataggtgcaggtgggacatgtggtgataagcgttgccgcaccggtggcgcgcgcctcgtcgatcacgcgatgcacgcgacggttcgtgatatcgggatcgaaagacgccacggcgcctcccgcgccgcagcagagcgtcccgcgtttgcgatggtccatctcgcgctgctctgcgctcggcacgtagcgcttcgccagcgctcggatggcctttccatgcctgctatcggcacggtcgtggcatgaatcgaaaaacgtgaggctccgagtttcgagcggggcgaagccggcaagttcgttcagctcgccttgttccagctcggttgtctttttgcccgatcgcgcaatcatcttccggctttccccgtacaagacctcgggcaacgggacgatctcgatttcgccggcaagcagttcggaaaactcatcggcgcacccggggcagatcgtgatcatgcgggttattcccgcggctctcatctggtcgagtatgcgttgtctgagcgcggcggcgcgatcgaacaggccggcgctcatgagggggctgccgcagcagtcgtctgacagcgcccatgcgatgcccgcgcgggtgagccattcgcctgcggcccgcgtgagctcgggggcgtagcttacaagcgagcagccggggaagaagagcgtgtctacgtgccccgggcccgcctcggcggcctgcgcgagcgtggtgaactccggataccctatcccgtagatcgcgcgataggcgctgaagatatgccactcgttatcgaccattaccagccgggaatcgtcggggggcatgagacctgcgcgcatgaacagctcgcgccagtcgcgcatccggtcgggggcgagcatgtgggtctggcacgttgccgtgcagtacccgcagaaacagcagcgccgaagcgcatggtagagttcggatcggcgctcgacgatggcgagcgttgccgagggctgctcgcttagcgggagggcgatgatggcgcggtaatcgccctcgactgcgccgatatcgaggtccggctcgcgcagaacctcgcacctgagcgtgcaccgcttgcaatgggagcatgtcagccggttgttcgcccattcgccaagtgcgtcaaggatgggggaatcgatgcgcgctacagcggcaaggttctcttccgtcagtttttgcggcctcatcgtcggatactcccgtctctcagaattcgagtgtagtgcactttttcgcgttcaggtggtaaaacaggccagcgagccgaagcgtcgctttaaggtggggccttgtagcggtgcggacgcgtctgctcgcatggcgaacgcgccgcttgcggaacgcgccctgtctgcaagaaggctggcgcgcagcctagccggcgcagcgaggcgtgtcgggcagatcgatatccagcgcgctggccgcatcggcacgcagctcttcgagcgtgagctcgtagcaggccagtgcgtcgatccagcggcgcaggcagcggcggcctttgtcggtcagcgagaacatgcgctttgcggagccttcctcgggggtgtcccatttcgatgtgacgagctcgttttcctccatgcgcttcaaggcgcggtagattcccgtcgcgtcgggtttctttccgccgaacatgggcgactgcgctgcgagttgcacgatgatgtatccatgaagcggctcttcggattttgcgagcagggtaagtatggtgggctgggagaggcggttgagcgattttccgagctcggcgcactccttgagatcgtcgtcggacttggggttgcagctatgccacatggcgttccttccaattggattcgatgggactatcatcccataaatagttgcaaactgctagtattttcatgcaaacaatccctggaacgacggaagccatcgcgcgatggcttccgtcgcaatgccgacgtgctctgtccgctttgccggcttgtcggctgagcggacagagctttgcgccagttgccctagatgcccagcacccccacgatgaagggaatccagaacgtgatgagtatgatcaggatgatggcgggaacgacgcccgttttgaacatatctccaaacgtgtaatacccctcgccgtaggttagcatgacggtcgggttgacgggcaaaagcacgtttcccgccacgacgatggcgagcgcgatcgtgggcacggcgggcgaaaccccgaagctcgcgcacagcgtgatcatgatcgggatgaagatggccaggatggccgcgccgatcgggcacagcgtatgcaggatgtagacgagcgtcatcagcacggctatcgaaccgaagaacccgaggttcgtgacgccgctgttcatgaacaggttggcgagaaacgttgccccgccggtcgattcgacgaccccgccgagcgtgaagatggcgccgcacatgatcacgattccccagggcacggcgctttggaattctttccaggttatgagatccatgccggggacgaacatgacgatcagtccgacaagcgcgacgatcgtggtgttgaatacggggatccagtttcctgcgatccagagaacgaccatcagcacgatgaccaggatcgccttgatctcgaagggggatacggttttggcttcttcggcctccttgcggatgtcggcgaacacggcctcggtgatgggttccggtttgattatgcgcgtgatggagaaccagcagaccggaaccatgatgatgacgaggggaagtccgacgatcatccaatcgaagaagctgatggtctgaccggttatctgctgcatgacgttcatggcgacgacgttgaaggagctgccggccggcgttgctatgccgcccgtgaccgaagcgacggggacgccgatcatgaggcagcgccccaggttcgattgcagcggcttggcgtcagcggctttgaggatcgcgagggcgaagccaaggaacagcacggtgcaggggacgtcggacatgacggtcgatacgagagccgtcgcgatcatgaatgcgagtacgagcttggtcgaatcggtcccggtgcgtttgagcagaaccgagatcaggcgcactccccagtgcgttttcatcatgacagccggcatggcgaagacggcgatgatgaagaagagggccgagctgccgaatccgacgaaggccgtcgacgcgctttcgagcactccgatgatcgggagcatgaccagcgtgaacagtgcggttatcccgacggggacggccgaggtggtccacaggcagacgagcgaaagcaggagaccgaggcacatgatcccctggtgagacaattcttccgagcccggtatcaggcacgaaacgatgatgcagatggccgcaaggccgatgccgacgagtcttttcggcatcgggacggtagagttttccattgtatataccccctatgtatgcgtactctggttccctcatgcgccagtcgcgagggaatcccaagaccgtggtacctcggtctcggggttctcgaatcatgcgactgtcaagcataacaggcgagctgttttcctacgcctgctttttcttggggatgcgaacggcgaatgcgcagacggcgcaaacggcgacgatggcagcggtcacgaagaacgcggtggttgcaaatccggttgcatcgtacagagcgccagccatgatcgggatgatcgacgagatgatcgtggtggtgagcatggtggtgctgaggttcttcggataggcggcaaggccgaagtagttcgctaccgtggtcggcaggttggttgcgatcgagccgaaaccgagtccggtgcagatgtagtagatgtacatcatggcggggttgctggccatggcagcgcacaggattcctatcacgatgagcacgagggccgctccgatgatgcggatgggttcgatggtgtcggcgagcaggccgatgacgagcttgccgatcaggcttgcgatgcccatgaccgacacggctgcaacgatggtgccgggatcgaagccgagcgaggtgaagtggatgacgccctgcgaggtcgcgaggctgaaggcgcagaatccgcccgaaccgccgacggcgatcagccagaagaacggggagcgaatggcctggcgatattcgatcttatctgcgttcttgtacaccttgaggggcttctgggcgccgccggcagcctggcttgcaccgccgtcgggctcctggccgatgtctgcggggcggttcttcacgacgaacaaggcgagcggaatgatgatgatgccgaagatggcgatcaggtaccagccgctttgccaagctccgcccgaagctccgatgatgttgttgacgacgagcggggccgcgaacgatgcgaggccgccgatgcccatggtcacggccatggcgacgccgcgcttggcgacgaaccattcaccgaccgtgctctgcacggagatctggcctgccatgatggtgctgacgctcatgatcacgccgaagatgatgaagtacatgatcgcgtctttcacgatgaagatcatcgcaagagcggcgaggagcatgatggcaccgccgatggccatcgtgaatttggcgcccttcttggcaacgagctgcccgacgagaggcgagggcaggccctgcatcaagacgaagagcgagaagccggctcccagtacggtgccggtgaggcccatcgaggggtcttgcagcatcatggggttgacgatttgggctgtcgcgagcacgaagcccgacgagcagaagtacatgatgccgagcactaccgtgagcggccatccgaagaacttcttcttttccatgttttctccttggtgttgatcctctagtgttcgctcgtcaaccgtttgtcggtaccgcggttgcgggcaacagaaccgaaagatttaagcatgcggatcgtgaatgactgattcggattgccgagactgctcatcgaagcgtgcgcttctcgggtaccatagcgtccggatcgggtttccgaattccggtcagccgtgagccgcctgctagaatccatgttccctgaaaaagatgtttgcttcccccttccctcattcgaaaccgtcgggagatctcaaacgggaggaatcgcgcttgggcgccttcgtcccccgctgtagttcggcattataggaacatgcgcgagtatggaacaaatacgtatgttgcatgagccgagactaaggagagttacctgcctatgcgtttttcgatgcatgtggtttcacttttcgaataaagcgaggacaggaagcgattgcacgataaaacaaggcctgcgcaacggcaggccttgcacgttcgggcggcgcgatcggctcggccgctacagcttcggaggatagatctcgggtcggatgcgctcggcatgctcttcgagcttatcggcgaagaattccagttcggggcgatcgagatcctttttcatgaacacgtacgcgtcgacgtagcgtttcttatcccgcagcggcaacaccgtcacatgctgtttgagaagatcggcgatgagcggcttgtacttcttgttcaccttggtgagaagatggattccgtcgccggggtcggctgcgtagaactcgagagggttgtccgagggcacgagcgtgatgttcgggtagaatccgacttccgagcacatgcggatgaaatcctcgcggaagcgctcgctgtgccggttcgcttgcaggatgaagcggccctgcgacagatcgcgcaactccagatcggttcgcgacgcccacggcgaatccttcgcgacgcccacgacgagttctccgtggaactcggggatccagatggagcgcaccgagctggggagcttcggatcggagaagccctcttcggtgatgacggtctcaaacgagatgtccaccttgcccatatccaccatctgcttggccgaaaggccgctgctgtccatgttgaggaactcgacgcgaagcccggcgaaattctgcttggccgaagcggccacctcgttgattcctatgtagagcgcattggtgtgcagcatgtcgaggatgaggatccggcggcttcgcgacgttggaagcgagtgaagctcggcgagcatgttcgcctgatcgccaatgatcttgcccgagtatttgagcacgacttcgcctgccgcagtcaggctcaaagggcgggtttcgtagaacagctcgcagccgaggtcgtttgcgagcgccgccatgtggcggctcagggaaggctgcgacatattgagatcgcgggcggccgagacgaagcttttgtgggctgcgagtaccataaattccctgtagatctcaatatccattaggagtcccccgtttttcggctgcgttcttggattattcgaaaagtgaaatgaagagtaacagaaaatgcatgaacaggtgtgcagttctgagtatcggccttaacaacatacgtatttgggtcatactcgcgcatgtttctataataccagaaaagcggcgcatatgaagatccgtggggatggatctgtcgcttccgccggggtctcgagacggcctttcggcaaagatctctattcaatccgccgtacaagagaaggagtgcactatggacttcaagaagaccgaagagcaggagcttctgctcgaaagcctcaggaccgtcatggagcggggcaatttcgagagctatttcaaagagtgcgacaagaaccacgagtacccccaaaaggccatcgacgccctcgtggaagcgggtttctcgtctttggggattcccgaggagttcggcggcaccccgaccgatatcatgacccagatcatggttgccgaagaggcgcatgccctcggctacccgtcgcttgtttggatcaacttcgcaaccgaggttgacgacatcctcgccttcggcaacgaggcgcagcagaaggagatcctcaagtacgcgcttcaaggcatcaagcctttcacgctcgggttcaccgagccccaggccggttccgacagcgccgccatggcgacgacggcgaccaagcgcgacggcaaggtgtacatcaacggcaacaagacgttcaacacgagtgcggatcgcgctccctacatgctctgcgtctgccgcagcggtatcaacgagaacccctacaaggatttcagcatgtatctgttcccgatggaccgcccgggcatcacgatcgaaaagctcgacaagatcggcaacaacatgtgcggtacctacgaagtgcatctcaacgacgtcgaatgcgaagagaccgatctcgtgggcgttgagggcaagggcttctatcagcttatgaagaacttcgaggtcgagcggctcaccatctgcgcggcaaacgtcggcatggcccgctgcgcttacgacgaagcggtcaagtacgccggtcagcgcgagcagttcggcaagaccatcggctccttccagctgatccaggaaaagatcgtcgacatgaagatcaagatcgaaaacatgcagaacctgctctataaggctgcatggaagaaggagaacggcgaatccatcgccatcgactcctcgctcgtgaagcgctatacgggccaggccgccttcgaggtcatagacgacgccatgcagatcatgggcggcatcggctatacgcacgactgccggatctcccgcctgtggcgcgaccagcgggtctatcgcatcatggccggcaccgaagagatcatggtgcatacagcgggccgcgcccttatcaaagaggctcagtaggcaatcggaaggagagagtaagcagcgatgaacactgttgcgtgttacaaggtggttcccgatgcccaggacatcgatgtcaatcctgacgggagcctgaacaccgcgaaggcggagatcgtgctcggcgagtacgatctcatggccatcgaggaggcggtgaagctcgccgaggcgacgagcggccgggcggtccttctttcggccggcggacccaagctcgtcgatacgaagctcgtcaaggctgccctttcgcgcggtgccgacgagttgttctgcgtggttgacgaggcggtcgaatccgccgatgcgtaccagaccgctgccgttttggcggctgccctcaaaaacatggaatacgacctcgtcatctgcggggaggggtccgctgatctttacgcccagcaggtcggatctcttgtcggcgctttgctcggccttcccgtcgtgaacgccgtcagcggcatcgaggcaaaagacggcgcggtcgttgtcgagcgcacgctcgaaaacgaagtcgaggtgctcgaagtggcgctccccgccgttgtctcggtgacgaccgatgtcaacctcccgaggattccgcaactcaaggacatcctcgctgccggcaaaaagccggttaccaaatggacgctcgacgaagtgggcggccttcccgaaagcggtgtcgaaaccctgtcggtcaaggctcccgaaagcatcgagcgcaagcaggtcgtgtacgaaggctgctccgacgagaacatcggggagcttgtttccaacatcaaagcatcatggtaggggtgaagccgcatgagtagagtgaacacggtatgggttcttggcgagacccctgaaagctacgcctctttgtgctccgtggcccgcaggctcggcgatacggtcgaggcggttgtgctcggatcggccgatgccgcacaggccgtcaaaggagcgggcgccgatgcggtgctgctcgctgcaaaacgagacggcgcccttgttgaagattgcgttgcgaccgttgccgctgccgctgccgaacgaaagcccgacgcgatactggttgcaacgaccaagcggatgcgtttggccgccgcccgcatcgccgcttcgacgcatacgcgcgtggtcaacgacgcaacgcgggtgtgggtcgacgacggctgcctgtttgccgagcacatggtgttcggcggcagcgcctacagcatcgaaaaggccacgagcgccccggcagtcatccttctgggagacggcctgctcttgaacgagccgcctctcgaaggcgatgcgcccgaggcggcggtgacggagcttcctgcggcggatgctgcttccgggctgaagctcatcgagacgaagccccgcacggtcgagtctgtgaacctcgccgccgcgcgccgcgtggtgagcgtgggccgcggcatcgaaaacgaagaggatctgcagatgatcaacgagttcgcccaggcaatcgaggcggaagtcgggtgcacgcgccccatcgccgaaggagtgaactggatgtcacgggaacgctacatcggcgtttcgggcgccatgctcaagcccgacgtgttcgttgccgtaggggtttcgggtcagatccagcatatggtgggcgcgaacaccgcaaagaccatcatcgcaatcaacaaggataagaacgctcccgtgttcaagcaggcggattacggcatcgtgggcgatctgtacgaggttgtccccaaactcgttgcggggctgaaagcgtaagcaaaccgttcgaacaagaggaggatttcaatggatgagaagtttttcgagggattggcaaagaacgtcagcgacggtccgacgccgtacatcaacctcgccaagcttgaggccgaagtcgtcgaggagcgccatgtgcgtctgcgccttccggtgaccgaactgcacaagaaccatgtcggcatcgcctacgcgggcagcgaattcgtgctggccgagatcgcgggcggcacgctgttcatggctacctacggcaccgacaaatacgttccgattctgaagagcgtcgagtgcaaatacctcaagcccggaaccaaggatctgatcgccgacatcgcccttaccgaagaagaggccgccgagaagatcaaggaggtcgaagagcgcggtcgcggaaactacttcctcgacgtgccgctcgttgacgtcgacggcgaggacatcgccctcatgagctttaactactatgcacttcctgcacagcactagcgcaagcaatgcgataacggcataccaagcgaagaaggaggaagcgttatgaagcaatacgatgcgatcgtcatcggtgcaggcgtcggaggccttgcctctgcgctgcttctcgcgaacagcggcaagaaggtcgccctgttcgagaagcgactgcaacccggtggacgtatcggctcgtcgaagcgcgatgacttcacggtcgacttcggcgtccatttgatctcccgcggggagaagggtccgctgatccagctgctcgaccgttgcggggtggaaaacgacatcgagttcacgaaggttcgccccatccagtcgacgggcggcgaaaagttcaagttcccccaagacctcaaaggccgcgttcccgacgaagatttcgatgccgtcatcaagatggtcaccgatgtcaagaacatgaccgatgaggagacgggcgaatacgacggccagacgctcgaggagttcctgaacacctacacgaccgaccccttcgtgcatgcgtgcgtgagccagatcggattcatctactgctgcattcccgaataccgcctatcggcgggcgaattcgcccgctgcctcaaatgggaggccgaagctcacgcttccggatacccgtcgggcggttgcgtttccattctgagcgcctacatgggcggccttgagcagtacggcgtcgagacctatttcggcaagcctgtcgatacgatcgtcatcgaggacggcaaggcggtcggcgtgatcgtcggcggcgaggagttccgtgccgacatgatcgtatcgaacgcaggcatccaggagacggtgcgcgaccttgtcggtgccgagcatttcgatgccgagtacgtcgagtacgtgaagaatctcgagatttcgttcgtgtcgatcatcgcgcgtttcgcgctcgatacggtgatcagccccgagatcaaaatgctttccggcttctcgtcggtccccgtcaaggaatacaacgacaagctgatggcgggcgaggtgcccgaggagctcaattccttcatcgtcgttccctcgagcttcgatccttcggttgcccctgagggaaagcagctggtcatgatgacgacggccgttcccgcaggtattcccgacgagtactgcccggccatcctcgaggcgcttatcgacatcgcagaggagagcttccccggccttcgcgaccatgcggtttttgtagagaaggtattcccttctgatgctgcacggattatgggcgaagatggcgcaggcatcggcatcgcccagcaggcgggccaggcgggcaaggatcgtccggccatcaagacgccgatcgagggcctttacatcgtcggcgccgaagcaggtggcgcgggcgttggtaccgagctggcggcaaacagcgcaatcgagttcttcgacacatacgtagcgtaaatctcgaagggagatgtctttcatggcaaagcattccgatattcccgcgtttggtaatcttcaaggtcttaaagttgtggtgtcggccgtctcgacggccggccccttcgccggcgaactgttcgccgaaaacggcgccgacgttatctggctcgagccgccgaagggcatcgacccgttccgctggacgcaggacgggtggggcgtgcaaaacgagcgccgcaacatgcgcaacctgatgctcgacgtcgtgtcccctgagggtcatgagatattcctgaagctgatcgaagatgccgatatattcatcgaggcatcccgtggcggccagtgggagaagtggggctaccccgattcgctcttgtgggagcacaatccgaggctggtcataggtcatatgtcaggttacggcatgacgggcgaccccgattacgtgagcttgcccggctacgatttcaccgtaagcgcgttcagcggcctcatgtacctcaacgggtaccaggatggtccgccgctcatgattcagaagttcgtgacggactactacgcgggcttgttcgcatacggctcgtcgcttgccgcatacgtgaacgcgcagcgcacgggcaagggcgaaagcttcgacctcgcccagttcgaagccgccgtccgctgccaggcgggtctgttcggcaaatggttcgagaagcagatccaggaagatcgcggagcgggggctccgcgcgacaacatctccgccggcgccggttactacgagtgcaaagacggcgagggcgtatacctcttcactgcaggtcagggtccgactaagaaggccatcgagttcttcggcctcgagtacggctccgagatgttccccgagggcattccctcggtcggcatccattcggagggtgcgccggtgttcgacggcgcgatcgagaagttcgcttccgagcatactgccgccgaatttgcggaggccatggcgaaagtcggcattccgtgttcggtcgtcatgaactacgacatgatggagaagcatccgcattatcttgcccgcaacacctggatcgagtgggataccgttgacggcaggaaggtcaaaggcgtcacctccgtgccccgcttcgccaatcagccttcgcagatatggcgcggttgcccttcgcagggaatggataacgacgacatccttgatgatctcgggttttccaaggaagaggtcgcggagttctacgagaagggcattcttcgcaagagcgactacgtgggtgggctttgatcaacctcgtcgacatactagacgcgtccgcgaacgctcatcctgacaaggttgccatgcgcttcaaggatcggtccttcacgttttccgacgtgaaggaccgggttgatcggctggctggcgcccttgccgaccggggaaccgaaaggcgggggcacgtagccgttatcacgcccaatacgagcgcatgcatagagatcgtctttgcgtgcgctcgcctgggcgcggtgtgcgagcagtacaacacgcgcctgtcggcgctcagcatcgtgggattgctgcggcgctcggatgcgcgcatcgtttttctctcgtgcgccatgtacgacgtattgaaggatcatctggaatccgtcggcaggccgctcacgctgattctgctcgacggcgtggcgggtgacgaggcggcgagggcgcgtgcggttgcgatagcggatggcgtggatgcgttcgattacgaaaacgtgctcgctgaagccgagccgcttgaagctgctgccgacgtttcggcttcggatgccgtcatcatgctgtatacgagcggcacgacgggcatgccacggggcgtgctcctctcgcatgaggcgcttttggcccgcatcgagatcgacacgaaggagatgtggttcactcccgatgacgtttccctgagcgtcttgcccctgttccacgtcacgtgcgttaccgcattcgtcacggtggcgaacggcgcggagctcgtgatcgccgattcccataagcctgaagatgtggctgcgatgatcaggacgtacggggtcacgcgcgttgggctcgttccgtttttgctgcgcgcgcttgccgattacgtcgagcgaaacgacatcggcatcgacaccctcaggcttatcgtgtacggaggggagccgatcagccttgatctgctgacccgatgccaaaagcttttgaagtgcgatttccttcaaggctacggcatgacggaaacggcttcggccattaccatgctgacccccgagcaccacaagaacccccgactcctctctacggtgggtacggtggttcccggcatggaactcaaggttgtggaccgcaccggcaaaacgtgtcctcccgaaatcgcgggcgaggttctcgtgaaaacgagaaccctgatgagcgggtactaccgcgatccggagcgtacggacgatgtcatcagggatggctggtattgcacgggcgatatcggcattttggacgaagaggggttcttgacgcttgtcgatcgtaagaacaacctggtcattaccggcggagaaaacgtctatccccttgaggtcgggcggtgcatcgaagccatgggcgacgatatcgtcgatgtcgtcgtgatcggcattcccgatgccgtttggggcgaaacgcttgccgccgtcgtggttcgcaaagagggatcggatgttacggaagccgatatcgtcgcccactgcgcgcataggcttggcgggtacaagaagccgcgcaaggtgctgttcgtcgactcgctcgttcgaaacgcgtcggggaaagtgccgaaggattatctcgagaagataaaagaacaactgatgtaaggaaggacgaccatggcagatttcgatgcgatagtcgtgggagccgggtgcgccggatccgttgcggcctgcgtgctggcgcgcgagggaaaaagcgtgcttctgatcgaacgcggcggcgatgcgggctcgaaaaacatgacgggcgggcgcatctacacgcattcgcttcggccggtgtttccggatttcgaagacgaggctcccctggagcgcaagattaccaaagagaagatttccctgatcacggagaatgagaatacgacgatcgagttcgcttcgcccgagctcggacgacccgagaacagctcgtattccgtgctgcgcggtcctttcgaccgctggcttgcggcaaaggccgaagaagccggtgccgagtgcattttcgggatcacggtcgaagatctcgtgtgggaggacggcaggatcgtcggcgttcgcgcaggggaggacgagataaccgcagaagtcaccattttggccgatggcgtgaactcgcttctgaccgagaaggcgaagcttgccacccgtccgtctgcccaccagctcgccgtgagcgtaaaagagacgatcgagctgcccgaacaggttatcgcagatcgtttccaggcggaggccggggaaggatccgcctggctgtttgccggcgcggcgacccatgggcatgtaggcggcggttttctgtacacgaaccgcgagtcgatttcaatcggcttggtggcaaccttgtccgatctctgcacatcgaaggttccggtctaccagatgatggaggatttcaaaaaccatccgtctgtcgcgccggttctcaggggaggcaagctcgtcgaatattccggacaccttatccccgagggcggatacgatatgattccgacgctttacgccgacggctgcctggtcacgggcgatgctggcatgctgtgcatcaatttgggctatcaggttcgcggcatggactatgcggtcgcttcgggcgagatcgccgctcagacagtgcttgaagcgctcgaggcgggcgacgtctcgtcggctcggctttcgtcgtatcgaacgaagctcgagaacagcttcgtgctcaaggacttgcaggcgtatcgcaatttcccctcgttcatggagggcacctcgcggatcttctgcgggtatcctgagatggcggcggatatattgcgctcgatgttcacggttgacggatctcctgtgcagccgatcaagaagaaggccatgggtccggtcaaggagctcggcatgtggaacgtgctcaaggatgtgcggaagggtgtgaaggcgctatgatcgaggaaatcacggtcaacgtcgacgagaagctcgccgtcgacaagttcaacgtcgacgaggcgaatcctcatatcgttctggtcgacgaccccgatcctgccgaattcgacaaattgatcctctgctgccctgcggggctctacaagcgcagccccgagggagatacgagtttcgactacgcaggatgccttgagtgcggcacctgcaggattctctgcggcagcaccattctcgaaaagtgggagtatccccaggcgggaatgggcgtgtcgtatcggttcggataggcgggcccgccgcttcgggaaacggcatttcggaggcaccgtttcccgagatgccgtcttgccttcgcccgggtattccgcaaaacaaaaccgccccggctttcgccggggcggtcgatcgttcgccaacttggggatggttcaatccgccgctaagcgagttggttgacgaacagctcgataacgccgacgtttcgatcttcgtcgaccgtcgtcgtatcgatcacgcgggtgaggtagccgtctgcttctacgtataccttgtagagcgcggcatcgacgttgtggaaccagaaatctccgaattcgtcggtttcggtggccaccacatcgccgttgtccagattttcgagcgttactttggcgccgatgatgacctcgtcggcttcgagatcgacgacgattccgccgatgaagcgtttcggcttgttgaggaagtacatgcggggcttgtcgtcggcgcgctcgggtacaagcagctctgctgcggcgatttcttcggcgaagtcggattcctcgccgaagcgaagtgcctcatgcgggcatacgtcgacgcagtgcggaatctcgccggcatcgacgaggtgcgcgcagcccgtgcacttctgcggaatgccgagctcctcgttgtagaagatggcatcgtaggggcacgcttcgacgagctccttgattccttcggccttagcgggatcgatgatgacaaggccgtcgtcacgtttgtacacggcttcgggggccgcagccatgcatggcgcgttgtcgcagtgctggcacatgcgaacggtgtaggataccttcactttgggaacctggccgcgaaccttttcctcgagtttcgtccagaactgcccggtgtcgggctgaggcttggcgtagggcatccagtcgttgtcgacatgttcgtctttgcaggcgagctggcagttgcggcagccgttgcatttgttgtaatcgaagatgaaaaccttgctcatcgttatgctccttccacgatgcgcgcggtcgctacgaggccgcaatcggggtcgtattcgcggttgaacgcttcgggatactgctcggcaagctggaagacgtcgactttctcgatgttgacgaggaatccgctcgttacctcgccgacggtgttcttcgaggtagtcggcagcggggcgatcaggttgtttgcgccgccgcggtcgaggccgcccgcacccatgacgatgggatcgacgcgtgcgccgtgatcctggtagatcgcgccgggtatgatgcgctcggacacgatgacgccgccgagcacgccgcctcgctcgttgtagatcttggcgatatcgccggtttcgaggccgagcttgccggcatcggaggggtggacccaaatgggctcgtacttgtagccgtcggggccggttaccttgcaggtctcgatttcgcgaagccaggttacatcgtcatgctgcgcgtgcacgcggaagtggggatggttcgaaacgagcaggaacggatacgtgcgtccgcggtcgagatactggcgctcctgatgctcgggcgattcgtcgacccaatggggcaccgggccgcgttccttgtcgtcgggccacatctgagccaaggaggtcgaatagtactcgagtttgccggtgggcgtgcgcagcgggctcttttcgggatccttgtagaacttgctgaggccgacgggcatctcccggtaatcctcgcgggtcgggaatgcgaagtactgcttctccttgaactcttcgaaagaggcgtcttcggggacgccggatttctcgaatccgtattcgatccactcgtcgtcggttttgccgcccagatagcgctcgtagatgttctcgtagatgccgccgaacttctcgagggccttggcaacctcgccgacggcttccttgtctgatttcgaatcgtaaagaggttggatggcctggcgctcgtacagcacgacgttccactggcccgaatcggaatcgctgccgatatcctctgtttcgaactttgtgttcgatggaaggatgatgtcgccgaagaagcagtcgttttccatccaggggtgctggatgacgacgcactcgacgttctcgtggcgcagggcgtcctgcatgtggtacccgccgttccagcaggtttcccaacagggcgtgtcggaccagaccatatggatgccgtgatcgccttcgagcgggaaggtgaaggggccggtgaactggtcctcgcgcggaagaccggcggtcacatggccgtaccaggtaactttttcgcccatgatggcctgcgggatcatggtcttggggatgaagctcggctgcgagccgctgcttacccagccgcgataggcggcacccatatccgggatcttcgagggaggcagcggcgatacgccgggaatgccgaacagcgtccactccatgaacttgaactggttggcgccgggcttgccgagcccctgcatgccgagcagcgcgacctcgaggcgggcgggctcgtgcgagaacgccgagcggatgtagctgcctccgttgcagtgcgcaatggaaaccgcgtgcttcgcccagtagcgggcgaacgccttgatggtgtaagacggcacgccgcagatcttttcagcccatttcggggtcttcggaattccgtcttcgccgccgagcacatagtagcggaagtgatcgaatccgaccgcatgggtgtcaaggtactcctggtcgtaggtgccttcggtgatccatgtgtaggcgatggcaagctgcagcgcagcgtcggtgttgggaagcacggggatccacttgtcggcgtgcaccgcgttcgtgtagttcacgtcgggcgagatgtggatctgcttcactccgatgtcggtgaaccagaagcagatgcggcttgccatgtagccgccccagccaagcggggtggtttcaacgtcgcagccccagaacaggacggcgtcgccgttttcggagatatcctggatgatgttgctttgcttggattgctggccgagcggatccatgccccagatgtgcttggctccccagtaccagccctcccagctgtcgggttggcgggcctgcgaggtgaatcccccgcagagttccatgagcttggtcatgcagccgtgggccgcatggacgattttcgtctcgccatggccgtcgtattcgcacagaatggaattggggccgtacgtgtcgtgaatccgcttgatctcgctggccacgagctgtgcggcctcgtcccaggaaatgcggacgtatccgctggtcccgcgattctgcgggttgcgctctccattgggatcccagtcgatgcgcttcaaggggtaggggatgcggtttttcgagtagacgcgcttcttgtagcaaagcgaaagcggcgagatcagcgttttgaagccgggctcgaacgttttgccgtgcgcctcgatcttccaggggttgaggtcttcggggtcgtaatgctcgtcgaaatggaaggggcgaatgcggagaatcttgtcgttctcctcgtcgatgtcgaccgagcaggcgtttgcgccgaggccgaagctatcgaagcccaatcctttcactatgtgggtgccggtaacgttttttcccatcttgtttctcctcactgtgtaagggctgttgcggccggtcttgcaagcggccgctctggcttgagccgtcgtctgcgctcggctcgcgcagacgacggctccgatccccgcggtttacgctccgggcgtcggaggcttcggcgccgaaggcgccccgggtgctttcggggcgcttggcgcgccgggaacgccgggtgctttcggggcacccggagcgccgggggcacccggcatgggggggattccgggtgccggcgctgctttggcgccgcagctcgggcactcgttggcggttggatccacctctgctccgcactgggggcatttgacggggcctgcctcaatggttggcggtctgaagcacatggttttcgtcctttctgcggcgagccgctaatcgttccattcactgttcgttggacttctatgcacaactcgaatcctgcgtatgcaacatctgcagactggggtcccagacgtttcaaatcgcgcggcccgagtaggtaccaaaaatgtaaaacagctaatttacctggtgttataaaggagttgagaacgcgctgccccgtctgtttttccatcgtggcaacggtctgaaaccagtatcgccaggtggcgaaaaatatctacaactgctaatgttgaaatcagtctttttgaaaaaatccgtatcatactgaaatgttgagaggctgactcgatgggggaaattggcgatacggtcgaacccgagcggacgcatacgccgggcgaccttctcaatacctacatacttgcaggcatcggtttttcgtgtcttatcggctgggagctttcggcggtgttcggcccgtcgcttgcactgctgagcttttgcgatattcgggaagccatccttttgcgcatcgtatccatcctgacgctcgcgctgtcgttcgtcgtgttcatctggaaacaggattggcttttcgaacatcgcaaccggctcttcacgatcggttcgcttctcgccctcttcgctgtggtaaacacgcttgtgaacctatcggtcgaatgggttcccatctgggtgtctgcgctcgtgtgggcgctgttcggcgtagctcaggcaagcatcatgacgtattggtgcatcttcttcagccttattccgactcgtcggacggcggttaccatctgcatcggggcatgcggcggcacgctcatgttcgtgttcgccaacgcgacgctcgaagcatggatcgggctgcttgagatcgcctttctcatcgtgggttcggttggcttggcggcgtttctctcgatgcgcattccgaaggatcggatcctgccggtaggggagtacaagaaaagcgcgctcttgaccgttccggcaacgctgtctgtggcgtgccatggcgcggtgtacggattcatgtcgatcttgatgtgctcgatggggccgattcccgctatggtgtgcggcgcgagcggcatcatcgggtcgatcccagcgcttgtctggggctatctcgggccgaaggtcgacgtcgataccggggtcgtccagcgcatctcgctgcctctcattatggcggggttgctgctgttcccttttttcgagggtgcggggcaggtgctctgcgggtgccttgtcaacatggcgcttgcgcactcctcggtgatcgcatggtattccacgagtatcgacaacgccgagttccagctgcaccccgttgatcggttcgcccatcgccaggccccaagctggacgggtttctttctcggatccatcgtcgcctatctgctcgtgttcgccttcggcgtttccgaatcggctttcgcctttgccgtggtggtgttcgccatcgtcgtgatcgcggtgttctcgatatacggaggcgatgaatcgaaaaccaagaagcgcttgaatgatctgctcacctcggcgacggcttcggcggccgcgacggcatcgaagagcgtcgacgatgcgcatgtgaacacgtttcgcgtacgctgcgatcgggtgatcgaagagcacgagctcacgcctcgcgaggccgaagtgttttacctgcttgcgaaagggcgcaatgccgaatacatcggcaagcagcttgtggtgagcagcgccacggtgaaatcgcatatctaccatatctatcgcaagctgggaatcaactcccagcaacggctcatgacgatcgtggatgacgaaaccattcccggaatcgacggcggtcgatagtttttcaggcaggctccgctgcggctcggatgcccgcaagctgccttgcgacctcttcggcgagcaggggaaccgtgtcgagttctgctgccatgacgggtgcaaacgtcaatccgagcctttttctgatcgtgatgagcagcagggcgtacttggtttcggcggacgaggatcccgtgcagttcatcgaaaggtcgcccaggctgtcgttctcgtcgatgttcgcgagcagtcggtcgatgctgtattcagcgagcttgggaatgcgatcgtcccagaattcatcgtcgtcgataagaaatcggtacctgatgaaactcttgaggtggttgtaggtgttttcgtaggagacgggctctcgttttagggcatcgagttcctcatccgaaaggatttttgatttttcgacatgctccttcagccccatggttcctcctcgcgaaatacggcgttttgctgcgacgttccggccatgcccgtcgagtgcggtcgatatcgtctcgattgtacggttttcgttcgcgcggtgcgtcaacatcagaagttgaaatggggtttttcggaggtatcaacatttcggtatgaaatggaaggctcatttcaacatgctcagccgatgcctgcgcggtaaaacggcgcaatgattcgcctatcgtgcatgccttgccgtgcggcggaaccatcgggattgagttcctcttccccgggtggcggttcgtgtttccgcgaggcgggcgtcacgtgattacagggcgagacgtcatcggcgagggacgtcggtggcgaaccgatatgcaatgcgaaaggagctggcatgaatcttgcagaaaaattcgagctgcgaaacaatcgtgaggttacgctcaatgtgaggccaatcgaaatcggcctgtaccacgattacgtgttcgagggcccgtgccgattcggaaaaggggacgagctgaccaaagagcacgacatgatggtcatcgagatgaaaagcaaatccgattatcagaagctgctcgataacttcggagacatccccggcgtcaacatcatggatcagatcgtgatccgccgcgacgagacgtttcctctgaacgatgcgatgctcgaggaaatggccgtcgatcacgataaggtcgatctctatatatacaacttcaccgtgttcggcgccgatctcgccatcgagttcgcccgccgttacaatgtcgcttcgatgatcctgcccacgcccaacaacgacgcccacatgtcggcggcatttcgtgcccgcggccttgaaatgcacagcccggccactttggaggacgctcgcaaaacgctgcgcgcgctgcgcgcccgcaaggtcatggcgagcacccgcgccctggtcgttgtacgaaacaactcggtgttcccggtgacgaactacgattcgttcctgaatcacgccgacgtgaccgagcgccttggcaccacgttcacctattacaacctgcatgagttcctcgatcagctccacgtggtcgatcccatgacgaatccgacgcttccgggccgcaaagccgataacatcaccgaggaggagatggtcgagatcgagcagatggtcgacgagttcatcgatgcggccgaggattgccatatgccgcgcgagaacatcgtcccgtcgatgcgcgcccattatttggtgaacaagcttctgaagaagctcgactgcaacgcgtttgcagccccgtgtcccgatatgtgcgcaacgcgtcgcctgaaccaagagaagaccacgatgtgcctgaaccacgtgctcaacaacgagtgcggcgtgtgctcggcatgcgagcaggacgtctctgcgcttttgtccatggtgcttctctcgagcctctcccagactccgccgtacatgggcaacaccgtgccgaccaagctcgatgaaaacgatccgctcgtcatcaagacgcgcgtcatgtttcgccccgagtcctgcgacgccgagacgccgaacctcgaagcgcagggcgccaaaagcgtgttctccatctaccatgcggtgccgagccgccgcttcgagggctacgacgcgccgcttgccccctacgccatccgcccgtttgccatggacgggcgctggggcgcgacggtccgctacgacttcaagcgcgatatcggcaagacgataacgcttgcccgattcgaccccacctgctcgaagatcctcatcgcccgcggcaagatcgtcggcggcatcgggtacaacgacgaaaactgcagcgagggcgtgttcttcgaagtgtccgacgggcgcaagttccgcgagtacacgatgacgaccggcaaccatacctcgcttgtgtacggcgatgtgttcgacgagatggtgctgtttgccgaaagcgtcggacttgaggctctgacggtcgaatagcctgcgagaagggctttgctgcgagtccttctcctcgatcgatgcggtgccccgagcatgcgagcgttcgcccgcgtgttcggggcgcttttctgcaagggcgattggatggttcgggtgaagcgggttgtcgattccgagagcgcggttccctagacttcggcgactgcctttctgatatccctcatgacggcttcgatgccgctttgtcgctctgcggagaacaaatcggcgagctcggtctgttcgagaaacgtgaaatccgtcgtgcggatttcgtcgtcggggcgaccggagtaaatctgcacgatcgcatgcagcactccgcgcacgatgagcgtgtcgctgtcgagcgcgattgcaaggttcccatcggcgcctcgatgcgcgttgagccagacttgcgactggcatccctcgacgagccgagcccgcttcttttcttcgtcgggcatcaccggcaggtcggcagcaaagccgagcaggtactcgtacagggaaaacggatcgtcggagaattccgcgaaatcgtcgatgagtcgttgttgcgcttctgctgctgtttccatggcaggcaatattatagcgcgatttcgcagcatgcgcccatcagcgttcggcttcgtcccatgcttttcgaaacgctgcgaaatccgaggccggcatcgggcgggcgaacaggtagccctggccgacggtgcagccgaggcctctgagcgattcggcctgctcgggcgtttcgatgccctcgcagacggtggcgatgccgagatcgcgtgagaggtcgatgatgccttggagcacgcgcgcctcgcggggcgtcgcattttcctgcgaaatgaaccgtctgtcgagcttcagcacgtcgatgggcagcttgcgcagcaggctgagcgaggaataccctgttccgaaatcatccatcgaaatgcggaagccttggctgtgcagcgtttcgacgatgcttacgactgcgttctcgtcaaccgaaaaaacggtttcggtcacttcgatttcgagtcggtgccgctcgattccgtagcgcgataccgtttcgcctagcctctcggcgaagctttgctggatgagggtgttgcgggagaagttgacggcgaacgttgccggcgccgcttttgcggccgcgagatcccgataggcttcgcatgcccgctcgagcatgtaatgatcgagatcgacgatgtgcccgttcttttcgaacagcggtatgaagccgtcgggcatgaggaagccgagggccttggaatcccatcggcagagcgcttcggctccgaccacctcgttggtgttcagatcgatctgcggctggaggtagagcttgaactcgttatcctggatgccttcggacatgtgcctgacgatatcgtttctgcggcgaagcgtttcctcgaaggcgctgtcgtaccaggcgatgccgtcctcgagcttgccttctttgagcgcggcggtcgcgttgcttatcgcttcggtcacccccatgctccccgaaattctgcacacgccgactccgaagcgaaatacctccgaggcgctggcgtttccctggccttgcagtcgccgttgcagcttgtctgctatcgagcgtattcgccctggcacgtctctgacgagcagcacgaaatgatcggcgttcgcgtgggcgcacagttcgttgccggagcagctctcctcgagaagctcgcccgtttcgatgatgatgcggtctcctgcgtcgtgtccgtaagattcgttgatgatcctgaaattggtgatgttggtgtaggcggcgagatacgaatcggccttcgacccagcaagcagcgctgtggcgtctccctcgaacgccgcgaggttgatgcccttggtgagcaggtcggttcggtaagccatcttctcatggcgcatgctgctgcgctcgaggaaaaggacgagcgaggtggcggcgaggatgaggacgagtccgaagaaaaacgaagccgcgaaatcctgctcggcgcgcgcctgcgcggcgtacaccatctcatcggccagctcgaagtgccgttcgctcagctcgagcagccgctcggtcgaaccctcgcccgcatcgagcgcggcgatctcgtctttcataagattccactggatgcgcgtcgcgtcgatcttctcgatgaaatcgagcgttgccgggcttttgagcgggcggttgttctcatcctccgaaatatcgttcaagaggtcgtcaacgcggcttgcggtcttgtcggcatgttcgcccatgagttccattttggccacgcgctgcgcgcctccccgtatcacgcccgcttcgttgatgatgcccgcatagctttgcatttggaagaagaggcagagcaggagcatggcgccgagaaaccaggcggcgatgatgatgaggtttctccgtttcacaggcagcctttcgggggatgaacgcatacgtaaccagtatagccttccagctcgaacagtgagaaaaatagttaggtataaagtactttttgaaccccattttttggcctttttggaccggggttggttgcaaacgcaagtgaagcactgtacggataaatgcaaccattgcatttatccgtacaaatctgggcctaaagcgttacgttagcccttgcgagttcgcttcggcatcctcttgaggcttccgaccctgccgctcggatcggaagtagggcatgctaacgcagaccccagtcctggggtctgcaaggctagatgcaatgcctggaagcttccgacagtggtgcgatcggcgcaacctctacttggatatcgctttgtcgacaagcacgccaagcgcctcgagttccacggccgtttaccaaaaacccatctagacctccttatcgctgggctcccggtacaagggagcgttttcacctccctgcaacccgggtgactaccagtgcatgaccgcccattctctcgtcgcccgataacatggggttcgtccgcgtctctgctcgggtattaggctgtcaaagcataaggtttcactcccagcaaggcgggttctacggaatacgtaggtacgtatattttccgacgtggattaattgcattgcatcaaaggcatgcgttcacaccatcgggatggcggacggtcacgcggcgcaaaaccagcgaagaatccgcgaccttgtgttcgagcatggttttccgggcctcttcggtcctctgaattatcgcctcgttttgatttataattacattagttatataatgttattcgttaaaattactatcttaatcattatatttggaatagcgttttcttactcaaggagctgatgcctatgcgggtatctactaaccaaaagaagaaggaatgccggtacggcggtcttttccctcttttcttgagtttcggttattgctcatcaaggaaacagtaaaggatgaattatggctgagaacaagatattctattcccgcagggacctactgaaattcggagcgttcggcgctgctggcttgcttgcggtcgcagccgcctcaccagctaaagctcttgcaggtgaggaggcgggccgctcaaccgccttcccgatagtaaaggccagcattaccgattcctcaacgggcgagctcctcgccgaaacaaacagtgtcgatgctgcatctattgcaagctgcccaggagtagaaccctacgtgcagatcaataacgtatcgagagacttgagagacaatagcgccggttacaccgccgtgattagatatgtgttcccggtaacggattcgatgatcgagaacgcaatcaagtcggggtacgttgaagaaactcgtgaactcggtcccgatgtcgagatgaatgcgaagataaccctcggcgtcgactggggcactgatgccagcaccgttcagatacagcgaggaacattcgaggtttcgcagaaaagcccgttcattacttacaacaacactttctacgcgatgatgcaaaaggataggttcattcaggagatgttcaatggccaacgcgtgacgattgaaagcgggtttcctgcgatttcgttcgaccactcagcggatctctatacgtgtggaggcggcgtcgggggagcaggcttcaacatactgaccgggcagggtttcaactatcaagtggatctctatctggaataggagccagcgacggccttgaccgccaatcaagccacatcgagatatgataggaatcgaggataaattatgaatagaaaacgcattgtcgcattcatagtaggagtcctctctgccgtcttcatcgcgtttccggcgtatgcggatgatgggaccgacggaaaagttcttgtcgacgacgccgtagccgtcgacatgggagaaaggttttttagtacggttgtgcccgaccagcaggtgacggcggcagacccgataaagctgtacaacaaggacggccaagcttcgggttacgttgttcatgcatattgcgacagaacgccctacggatatgttgtttacgacttcgacagcgattcggggatcgcagagttcgcctacggcgaggaagccacaagcccttacatgacatcaacagagctcgctcccgcgacccgatctggtggtgagaagaagttttacaagctcgatatggtaacgtacgccctcattgatgatgaaacggaactgggcttcacaaattttggagaaatcgttgatgccgaagctgagggtgttaccgttaactctgcaagcacacgttcgagtaagccgacaagttggaaccagtgcttcgtagacgcaactgttgtgtacaaagactataacgtcggtcaggcaaacgcggtgtcgggataccaaacgtacagcgaacctttagttgaatcaactaccggaacgtatgcctgcgttgtatcggcaatgctgacggtcagcagtcatttcgtgtctacgggcggaacaagcggattgaagtcggatgcttattgcgccgtttttgctacaccgttccacgctccactgctacagcgttccatggcagactgccacgtagcaatgcgggttgctctgattgcgaggggcgcgcaagcgcccctcttggccaatacggccggttatgctcttagccgatgcgcttgcgcattgactcgtcgccttcaatatggatgacgtccgaccgatagactatgcggtcgatgacggcatctgcgattgctccttccccgagctttgaatgccagcctgctggcgagaactgcgagcaaatcaataaggacccgctgcgcaagcgcgcctcgactatctctaaaagctcgcgcgccgccttcccctcgagcttttccaaaagccaatcgtccagtatcagcaagtcgcatttcgtgtagcgcttcttcgccttgagccaatcctcgttcttgctcacgttcagctcgtcgagcatttcgggcaaccggacgtaccttacgctgaagaaggcgttgcaggccgccaccccgagcgcgcaggcaatccagctcttgccggcgcccgacgcgcccgtgatcacgacgttgcggtggcctcttatccatgtgcagttggacagctctatcagtttcgtgcggtcgagcttgcgatccgcgtcgtagcggacatcggcaatgttcgcctcgggatcggagaagccggcctggcgcaacagcctcgtcctcctgttgatgcggcgcgcgtcccattcggcatcgactatcatggcgaacctctcgtcgaaggtcatctctgccactccttgcgattcctcctggtcgcgatacgcttgcgccatcaccgacatcctcatgccatagagtttgtccatcgtcgtctggctcgccgtcattattcatcgtccccctcgctcaagttccggtagtagtcgcctccgcgcagatacgctccggcgttttggtcctcgggccctgcggcccccatctccgagataatcgatttgatcgtcttgtagctcggcctgggcgttagagagcaggccttggcgcacgcctgctcgagcatctcccttccgtgcttcttcgcgagcgccagcaccgcgcggcacgagcggtaggactgctgctcgatcttgcgcgacctcaagatggcatcgacggcttccccgcaggacgggccgatcccggccgcccatttacggaagcgcttcgcgtcccactccacaaagtcgcgatgggaatcgggcatgtggtcggggttggtgcggtagcttcccctagggccgtagatgcgctcgtgcatggcgattcgctcgccgtcgcaggccacccaaacagcggatctggtggcgcatagctccacctcgcgcttgacgtagctgaacggaaccgagtaccagcatccgtcaaacgagacgtggtagttaaaattaacagtgacaaccttgcgggtaaccatctcgtagggcttgcccggcagcgggatgagcagcggcttctcttggcggacgaagacctcatccctgctgccctcgcgcttctggaacggacgggcgttgatctcgcgcaccttctccaaaagagcctcgttcagctgccggagagaggtgaacagctggttgcgaaggggcgcgatggcgcgctgctcgatgaccctcacgctcatctccaccgcccccttgtccctcggcctcctggggcgcgcgggcacgacggcgcacccgtagtactcggccatcctgcggtactgctcgttgatcacgagctcttcgacggtgttcttgacgacgccctgcttgaggttgtcgggaaccactatcggcacgctgccgccgaagaaggcgaaggcgtggacgtgggcctcgacccaggactccgctctcatgttgtaggcgccctcggcgaacatctcgcccgaatagggcaagcacgccacgaagacgtagactttgcgcgcctcgccggtgtcggcgtcgagcacctccatggtgtcgccgacgtagtcgacctgcatctcctgggcgggtttgcgctcgatgcgcatggagaccttgttggcggccgcccaggcgcggtgcttctggcagaaggcggagtacaggtagggttccatgcccgatgccagggcgtcctcgcagtactccctccaaagcgtcagcatggtcatgccgggacggttcatctccttgtcgatgcggggatggtcgatctccgccttcgacatatcggatcgctcctttgccggatagatgacggctcgaatcgccgcatcgttcatctcctccggcaagggccactcgaggccgtgcgccttcgcgcgggtggtcaccgcccttaccgttgcggtggagcacctgcacgagaacgctgtgttcctgacactcacccccatcgccctttgccgaagtatttctctgtacttgaccattttttcttcctttctcgcaatggtccgatgggcacttttgtgcccatcggaattgtggcggaaaaggaagcgcccctttcggggcgcgtggcaatttagattgttagggtgtggcagtctgccatggagcgctgtagcagtggagcgtggaacggtgtagcaaaagcgctgcaatagtcagtcggactatgcagagctttggaatctttcatcgacaacagtgtacaaagtagagaacggcatctcctacggttccactaatatgaagaatgctggtccggcaatcgttgcctacgcgaaagctcgcgggaagaatctgaactatgcgaatcattttctctttcctgggatgaacgtatacagggactcgatcgatgacggcaatatgtccatctttggcgctggtctggcagccgactcagatattgggcacgccatggccgttaccggatatatgaccttaaacgctaaagatggatcgggttccttgaattgtctatcggtttgtgatggctggaatggcaacacgcgaattctcaactacgattcaagctactatcgcgacatgaccgctatcgcaatctggtagtttatttcttaggctcgacgattaattgattatccgcatggagaggatatgcgaatttagccgatcctctctatgcagagacttccaaagatcggaagtgatgcatggccattaaaagaaaatcgacgaaagcactagcaatcgcgttcgcaataacgggaagcttagccgtcgttgcaggaggtttcttgctctggcatgtgatcagggtttccaacgccggaacgggcccgagcgaccatatgttctacacgacgggtaaggtaatctatgtggattccgatgcgatggtattcacgatgacggtcgattcgggcaataaggagggcatcggggacgggtgtctttcggtggactattcaaccgtgtttaccttgcatggaaacattgatgagctggaagtcgggcgaaccgtaaaggccggctatctgattcctttctccgaatgcgtcgccatagcctattacttggaaataggggagggcggtaccggctcctgaaaacccgctgtcgctaaccgcgctgcaggctacctgcagcgcggttaggctatgcccgacccgcctccgtcccgagtcccctgctcaagaccgccccggcatgtggaaagatattgccgggtccttcccttccgcatgcgcagcttcccgcaagtcgacagaccctgctgaggaaagctggctcccgaacgatcgatacgcttcgcgcgcttttcatctcaagaggagaagtaggttaagggaaatgcacacgaatgtgcattcgaacgattttcggcgcgtcgaaaacgctggtagaacgataaatctcgatagtgcatatttgccacatatcaggctgactgaataacggattgtaatacggatattcgaatgccgtattgctacttcgagaaggtactatgtctgatccgatgcttcaatttcgcgccgcagcgaactgcagcgggtaattgggatcgccctctcgtattccgcggcaataggtcggcagcaatcagagacttgatcctggtgggcgcagcccagcacgatgccatcgaaggagccgtggccaaagcccttgacgaggcctctggaagattcgcccgcatcgcttcgcgaggcacgaaggcctcgcgctcttgtagatcatgctctctcgatttacttgccgatcttcttgaaatcgcccgcgcagcagagcttccggcgcatgtcaggaaggccgaaagtgcatccgaggcagtgcggcgagccggtgatgtagagccactcctcgtcgaagccaaacagctcgatggggtcggtatggtcgtagtggatccttcgggcttcggccgacacccgtgcattgagccgatagccgggggggggtgcctcgaggcgaacagattggggagagtctcatcatggaggatcagttttcaaaagaatgcagtattagtttttcagaagaggcggccgagaatataagcataaatatccgaatcatgagtcttcgtcttcgagcctgtagcacgcaagccccatctcgtccgggttgtcggtatattccaggatgtcgcccggctggcactggaggtgcctgcatatcgcgtcgagcgtggagaacctgacagccttgactttccccgtcttgaacctcgagaggttgacgtccgctatgccgaccttctcggccaaatccttcagcgagacctttctctcggccatggccctgtccagtctgatgattatggccatgctgtcacctacatcgtctcgtcggtgagctgttggaggagggatccgtattcgaagaacacggagagacagtaaaggaccgctgccatgaagatcgcaccgccgttaatcttgacaacggatccgccgaggtcggttgtgccgacgacctgtatttctatacccgattgcagaaagaggatcgcgctgcccgcggacatggtcagttctaggacggcaagccatatcatgagaagagccattgttcggatgcgcttgacttgagcaggggagaaaggggattcgcctctctccattctttttgaaccgtgcgcctgtggcgttcgtgggggttcggttgacgatcgggtaacggggcttgcaacgccgttccatggtgctatacttcccacaaaaataaactgactagtcagtcaaaaaaaggagtaagcaatgacagggcaaccgtacatggcggcacgcggcctcgagctgaagacgcttgcgggctatgcgtacaagggagtcgatctcgaggtgtcgaaaggcgagcttttcgcagtgcgcggccgcaacggcagcggcaagacggcgttgctgctcacgctggccggtcgtatgaagccgacgggcggtacgctcgtcgtcgggggattcgatcttccgaagcagcgtgcgaaggtcgggcgacgggtggggctcggtgtcttcgccggtctcaacgagcttcaggagagtctgacggcgacgtatgcggtgggagccgaattcgagctgttcggacgcaagcccaagcgcgagcaggttgtcggctacatgcgcgcctggggcatcgacgacgttgccgacgttcgcatcaaagacctcacggccgagaagatggcgcagcttggcatcgctctcgcgtttgcgggagaccccgatgccgtggtcatcgacgacatcgaggatcagctgacgatgtcccaatcggaagggctcatggagctgctgcaccgctcggcgcgcgaacgcgatgtcgcgatcgtagtgggtgtggtcgaacgcgcccttgccgaaatggcggacgataggatctacctggcgaaggaaggtgagtagcatggcgttcaagggtttgcgattcgccggactcgaatggaagaacataacggcatcgaaggtgatgtgggttgtcatcgcggcgattgcgatcatgccgcttctgtacggcgcgctgtacctcgcggcgtttcaggacccgtatgcgcgcctcaatacggtgcccgtcgcggtggtgaacgaggatgaaggcgcagtgatctcgggcgagaaccgcaagctcggcgacgacgtggtcgacgagctcaagaaaaccgatgacggcctgcagtggaacttcgtgtcggcggaagaggcgcaaaggggtcttgaagacggcacgtacttcatgtcgtgcacgattccggccgatttttccgaaagcgtcgcctcggtcgacggcgattcgccgcgcaaggcccaactgaagatcgaatacaaccagagcgagaacatgcttgcctcccagatcggagaaacggtgtggaaggaggtccgccagcgcgtgagcgacagcgtggccaacgagtactggacgaccgtgctcgatcgcgttgccgattcgggcaaggacatccagagtgccgccgatggggcgggctcgctcgaggacgggctgaagacggctcaggacggaagcaagaccatcacgaccaacatctctgcgctcaaagacggcgcgctttcgctcgagagcggcctcgttacgctcgcaggtggggcgctttctcttgacgagggtacgaaatcccttgtttcgggcgccgatcagctgcagtccggcgccgatcggctcgcgtcgggagccgataccgtttcggcgggcgcttcgaagctcgagaaggggggtacgggcgttgtggcggccggagcgagccagcttgcccggcagacggccgatttgcccgagcaggcagcgcagctcgatgccggagtgcagcaggtcgtgggaagcatgagcgcgcttgcgggcagcatcggcgccgacgattcccgatcgagctccgagctcatcgggggcgtgaacctcgttgcggacggcttgggtcaggtgtcgtcgggtgcgtcgagcttggcttcgggattgcagggagcatcggcgggcgtttctcggataagcaacggcgtcggcttggttaacgcgtcggcaaacgatgccctcgccgtgctgggcgacacctcgctttccgatcaagagaagctcgctgccgcagagcggtatctcaccggcatatcggacgcaacgggaccgtcctccgatcttgccgcaggggttgccggggtgcagcaagggcttgcgagcaccgatccctcaaaccccggtgccattgccgcggcccagtcgatcgccgctcagaccggtagcggatccgcgctgcaaacggggcttgcgggagtcaagggcggcctgtcgaccgcgcgcaacagcatcgaggacagcgccccccaactcaaggctctcaccgatgggacggcggccctcgctgcttctgcacctgcgctggcaggcggaataagcaagctcgatgcgggggcaagcgaagtgaacgccaacatggctgcgctcgcttcgggcgccgccgaagttgcttcgggcgcgagtcaggttgacgaaggcgtttcttcggccgcatcgggagcgggcgagcttgccgacggcgcatcccggattgcggctggagcgcagtcggccaaagacggatcagtgcagatcgcctcgggcgcatcgcagctcgaagagggcagcgccacgctgaccgacggccttgccgatgctgtcgacggatcgggcgagctctcgaccaagcttgccgagggggcgcaaaccgcggccgaacaaactgagaacatctcgggcaaggccgatgccatgtccgatccggtggagcttgtgaacgagtactacacgactgtgaagaactacggcacgggcttcgctccgtacttcatggcgctcggcctgtgggtcggggggctcgtcgccgggttcgtgttcaagccgctcaactcccgtctcatcctttcgggcggcaatcccgtcatggtcgcgtttgccaacttcatgccgatggccgtattcgcgatcatccaggcgacgcttttgatggtggtgctccagtttggtttgcagcttcagatcgacaacgtgcccgcgttctacgcgatgggctatctgacggcgatcgtctttgcggccattatgcagttccttatggctgcgttcgggttcccgggcaagttcgtcgccatcatactgctcatgttgcagctgaccgcatgtgcgggcacgttccccatccaaaccacgcccgatttcttccaggccatcaatccgttcatgccgatgacctacgtggtgcaggggatgaggcagatcatgacgggcctcgattacggcatcgtggctttcgactgcaccgtgttgctcatgatcggtgcggcgtgcttcgcgctcacaagcgtggtagcatatcgtaaacgcacggtccgcatggacgatctgcatccggtgcttcagctcgggtagcgaagcgggatgtgcggcctgtgctcagcgcaggacccgtcggataggatggcgatatgggtcgggtacgtgaagcggtttctcggcagggtgaaaaaggcggcaaggcacgcgcgacgcgcgccttgctgctcgatgctgcggtgaaggtgatcggccgaaaggggtacacgggggcgacggtcgacgagatcgtagaggaggcgggcgtctccaagggccttgcctactaccatttcaagagcaaggcggagatggccgagagcatcctcgacaccggtatgggcgaactcgccgatgagttcgtggagatcgccgcgtgcgccgacagcggcccctcggcgctcgtcggcatgatcgagcggttcgccgtgaagatattcgagaacaaggagttcgggcgtttcttcgtgtccgagctgtggcgcgagggccgcgtgtggtcggggtcgatgcgcgaaaacgaagagcggctgctcgggctcatacgcgatcagcttgcgcgcgcgaaagccgaaggtctcatcagacccgagatcgacgtcgatttcgaagcggtcgccctggtgggcatggtgcttacgacgtcgttgtactatatcgacgagaaggccgcagtgagcaaagaggcgttcatcgaaaacatcatcgacttcgtccgccatgcgaacgtgggcacggagcagtgagggcattcggcgcgatccgctcgtgtgctcgctgccggcggttgctcgtccgatcgaaaacggcacggcaacgcggttttgttgattgagcgagtcatgcctgcccgaggtctcgctgcgttacaatgatcggcatcgaaacgggcgcatgcgcccgtcgcaggtgcgcgcatgcgattgcgcgaaggcagacgaaggagtacggctctatgtgcggaattgtcggctatacgggttctcggcccgtcaaggatattctcatcgagggattgaagcgcctcgaataccgcgggtacgattcggcgggcatcgccgtcgagggcgaaaacggtctcgatatcgtgcattgcgtgggcaaggtcgaaggcttggcggagaaggtcgccgatagggatatgcccggaacgtgcggcatcggccacacccgctgggcgacccacggccgcccgagcgaagagaacgcccatccccacacgtcgtgcgacagccgaatcgcggtcgtgcacaacggcatcatcgaaaacttcgccgagttgcgcgaatcgcttatcgcccatgggcacgtgttcacgagcgacaccgataccgaggtgctcgcgcatctgatcgaggatgcctacgaaggcgatctgctccatgccgtgcacagcgcgacccagcgcgtgatcggagcctacggccttgcggcggtatgcgccgatgagccgggcaccgttatcgccacgcgcaaggattcgccgatcgtcatcggaaagggcgaggacggatcctacgtcgcctcggacataatcgcgctcatcgacgcgacgcgcgacgtcgtcattctcggggacaatcagttcgccaagctcatgcccggttccatcgagtactacaaagaacccggcgagcgcttcgaacctgaggtgacccgcatagattgggatgtcgatctcgctgagaagggcggatatcccgatttcatgatgaaggagatacacgagcagccgcgcgtcgtgcgcgacacgttggcgggcaggctcacggggggaaccctgacgatcgacgaactcgatttgagccatgaggagctcaacctcatcgaccgcgtgtacgtcatcgcgtgcggaacgagctaccatgcggggcttgtggccaagcagctgatcgaaggctgggcgcgcatccccaccgaggtcgaggtggcaagcgaatttcggtatcgcaaccccatcatcacgcccaccacgctcgtcgttgccgtatcgcaatcgggcgaaaccgccgacacgctggccgccatccgcgacgcccgcgtgcgcggcgcgaaagtgttcggcataaccaacgtggtcggcagtcccgtcgcccgcgaaagcgacggcgtgatctacaccaaggcgaacaaggagatcgcggtcgcttccacgaaatcgttcctcggccaggtcgtcagtttgaccctgctctcgatgctgctcgcccaaacgaagggcaagctcacgacgagccagatcaagcttctgttcaaagagctcgccgataccgccgagcagatcgagacgatcctctccgatacgacggccatcgacgaagcggcgcttgcctgcaaagacgcctgctcgtcgctgttcatcgggcggggcctcggttcggccatctgcgccgagggggctttgaagctcaaggaaatcagctacctgcacgccgaatcgtatccggcgggcgagatgaagcacggcccgatcgcgcttatcgacgagggatttcccgtcgttgccgtggctacgcagagccccacgtacgaaaagacgatctcgaacttgcaggagagccgcgcacgcggtgccatggtcgtcgccattgcgaccgagggcgataccgagatcaagaagcatgccgagcatgtgatctacattccgaaggtgcgcgactgcttctcgccgattaccgcaagcgttcccttgcagctgttcgcccgcgccattgccgttgcgcgcgggtgcgatgtcgatcagcctcgcaacctcgctaaatccgtgacggtcgaataggggcgcccgtggttgagatcggtgatcaggcggttgccgctgcggcgggagatctccccgagcgcgacggcatagcgacagcgcccttgcaggacgctgccgcttcgggtgcagaggcgccgacggaaagccgcgtcgttgcatcggcatctgccgaacacggcgaagatgcagaggcatcccccgaagtcggtgggcggcgcatgcgcacgctcgaggaagtcggccttggggtcgacatcgtcgagatcgcgcgcatgaaggccattctttcgcgtacgccgagcttcaagaaaaaggtattctcagaagacgagcaggcctattgcgatagcaaaggcgtgcctgagatccactacgccatgcggttcgccgccaaggaggcggtcttgaaagccctcggtaccggattctcggagggcatcggcgtgcttgatgtggaggtggtgcgcaacgcgaagggcaagccttcggtggtgctccacgggcgcgcaaaagaggtcgccgccgatctgggcgtcgtcgaactgccactctcgctttcctacacccacaccgaagccgttgcctgcgcgatggccattaccgccgaatcggttaaggccgccgaaaagcgcgtcgacccgatggaggagctcgccaagcaattcaaggaggcgcgctccctgctcgacgagatggatcaaaagccgaaagagaatgcagatgaacccgtacggcaaagctaggttgcgcgagcttcttccgcatcctggcgagggggcgaacaagtatacgcgcggcaaactggtccttatggccggaagcgcggcgtatccgggtgccgcatgcctttccgcgctcgcgagccagcgcatgggggcaggctacaccgaggtgatcaccgataagcgcgctgtcgaaaccgttcggtcggtcgggccgtcgcttgtcgtcgcatccgacgaagcatggttcgatcgcccgcctgcggttgcaacggagaagcacccctgcgccgttgcagtgggatccggcttcgattccggcgaaggccgtacggcgcggctgcttttctgcgcgctcgaagatgccgacgccccggttcttgtggacggcggcgccctcggcgtcttggcaagcgacgagggccgcgccctgtgcaagcggcgcttcgtggaaggcaggccgaccgttgcgacgccgcacggaggcgaggcggcccgtcttgcgaagccgttcgatctgccctgcgacgatccgtcgcggctcgcgcggtccctatcgcttgcatacggcatggtcgtcgtgctcaaaggacccgatacctggatctccgacggggatgacgccttctgcatggacgagggaacggcggctctgtcgaaagccggcaccggcgatgtgctcgcgggcatgatcggctcgctgctcgcccaagggcttgatcctctcgatgcctgcatgctgggatcgacgctccatgcgcgtgccgggaagatggctgccgacgagctgacggacatctgcgtgagcgccgaagacgtcgtccgctttctgccgcatgcgatcaggtcgctctcttccgaaggcggcagatagccgcacgcgatcggccgccgccttcgcgcgcagttttcccgcacggggcgcgaaggacgcttttcgggtgcgcaaaggcccttagcgccgttcgataatctcccgtcttatcgttttcgcgccggttgcgttcgcgtaaccgttgcttcacgaatccccgatcgcccgtgacgggttcttctcggcagtacaatcagtgaaatcgaagagaggtcaggcgcccgcttggcgggcgtctgcgaacgaggcttaaggagttcgatatggaaacgacgaaaaagcgggattggggattggtcgttgcgggcgtgctgctcgtgctgtgcggcgtattcttcttgttcgccccggggctgacgcttgtcacgatggcggcttttgccggcgcggcgttcctcgtttcgggcgtgttcgacatcatctcgtatgtccggttcaggaaagttgcgaacatgtcgggttgggcgcttgcttacgccatcctcgacatcatcgtgggtctgatgttcctcatccatccgcttgcgcttgcggcggttatcccgtggatcatcgggctgtttttcgtcatattcggcatattcgaaatcgtcggatcgttcaaaatcaggaaaacgggttcgggtctttggggttggatgcttttctccggtatcgtgggcgcgctctgcggcgtatgcttcttcgtgttcccggcaagcttcgtcatctacatggcggtgttcgtgatcatgcgcggtgtgtcgcttgcgatctacggcgcttcttcgcgcacgatgctgtaaggctgcatgctgcgtattgcggtaccgcttgcgagccgccaacgagccgagtgcgaaaggcggcgcaagccccgcgcggcaggttgagcgctaagcgaggctgcgcatctcccttcgcgaccggttgtgcatgaaaaaaagccgattctgccaatttatctcgacagtcctgcaaaaccaaggcgcttcaggtccatttccgcgcgcggtcaaaatgggtgtttgcaagcccccagttcaattgcgagcatctgtacggaccaataacgtaatgaagcgccagccgcaggactgtcgagataaattggcagaactgagggcgattggtgcacgggaggtctcatgacgcgggttcgttccaatctggtagaaaaatccactttgggcaatggtaatcgcaataatcggcgattcacaattccgatccgcggcaaacgcgcaggtcgcgcaaagacgggctgtcggcctgattgcccgaagtccacttttcagccagattcgcgtcttgctctgccgccttccgacgcggtgggcttgtgcgtcgggcgccttcgccgcgctgccgcaccgcgggcgccgtcggatgcaagcggcgcgaccgcccgcaggtgcgctcggtgcgctcggtgtggcggacccgcccggctcgcccgactcgcattgcgcggccgttctttccttcttctatcgggattgtggcttcttcttttcactgcgtccgttttgcgggaaaaaacaaagctttgccctacaatagatgcccgaggccggatggtgccgaagcggcgaaatgctgcgctgcgcaccggcatccggtcgcttacggtacagatcaagagcgaaggcgaagataccatggcagacccgaatggcgataggttgttcgaatccgacgatccagcgcaggccgcagccgatgcgaaagcgcgcatcgatgtgctgcgccgagagatcgagcaccatacgtatttgtactacgccaaagatgctcccgagatatccgacgccgcattcgattcgctgatgcgcgaactgcgcgaactcgaagccgagcaccctgagctcatcgacgcgtcgtcgccgacccagcgcgtcggcggttacgtgggcgagcagttcgcgcccgttgtgcacgaacggcgcatgtactcgctcgacaacgcgatggacatcgaggagctcgacgcgtggctcgagcgcgtgatcgaggcgttcggccgcatggtccccgttgtctgcgaactcaaaatcgacggctcgtcgattgcgcttacctacgagaacggcgtgctcatccgtgcggcaacccgcggcgacggcacgacgggcgaagacgtgaccgtgaacatgcgcacggtgcgcgatgtgccgctgcgcctgcgcgacggggctttggcaggagccgtcgatccggaagccgcgctcgaactgcgcggggaagtgtacatgccgaaatcgagcttcgactcgctcaacgcggccgccgttgctaacggcaagagcgcgtttgcgaacccgcgcaacgctgcggcgggaagccttcgtcaaaaggacgccaagatcactgcgggtcgcgatctctcgacgttcatgtacgcgatcgccgacgaaggaaagctcgccgcatcggggcagtgggagctgctcgaatggttgcgcgaagccggattccacgtcaaccccgatgtgaagcgttgcgaaacggcggacgaggtgcatgcgttctgcgagaccgcgctgcagcggcgagaagagctgccctacgagatcgacggcgtagtggtgaaggtggattcgttcgccatgcaggaatcgatgggatacaccgcgcgcgccccgcgctgggccatcgcgtataaattcccgcccgaggagaagacgacgcttctgcgcgatatcaccgttcaggtgggccgtaccggggcgtgcacgccggtggccgagctcgatccggtggttgttgcgggatcgacggtcgcccgcgcgacgcttcacaacgtcgatgaagtgcaccgcaaggatgtgcgcatcggcgataccgtcatcgtgcgcaaggcgggcgatgtgattcccgaggtgctcggacccgtgctgagcctgcgcccgcaaggcgccctgccgtggaagatgcccgagacttgtccgagctgcggatcgccgcttgtgcgcgaggagggcgaggcggcgtatcgctgcatttcgatcgactgtcccgcccaagcgctcgaacgcctgcgccactgggcaagccgcggcgccatggatatcgaaggcatgggcgaggagatcatctcgcgcctcatcgaaagcggccgcattgccgatgtggccgattactacagcctcgacgaagtcgagctctcgctgctcgatatgggcagggtgaacaaggacggcgaacctatcaggctggggtcgaccgttgcggcgaagctcgtggccgctatcgaggcgagcaaatcgcgcagtttcgcccgtgtgctgttcggtttgggcgtgcggcacgtcggcaagaccaccgccgagttcatcgtggcggcatatccctcgatcgatgcgcttgaacaggcaaacgtggaggacctctcggcaatcgacggagtgggccccatcatcgcgaagagcgtctggtcgtttttgcgcacgcccgacaacctgcaggtgatcgagcggctgcgcaaggcgggcgtgaacctcgaggaatcaaccggcggcgaagacgggttgccccaaacgctcgagggtctcactttcgtgctgacggggagcctcgtgaaaagcggcatgacgcgcgatgaggccggaagcgccttgaaggcgcgcggcgccaaggtgtcgggcagcgtgtcgaagaagacgagctacgttgttgcaggtgaagcggctggctcgaagtacgataaggcgatcgcgctcggggtgccggtgctcgatgaagatgcgctgctcgccgtcatcgagacgggcgaggtgccggttgggaaataggcgcccgcgaatgccgcgtcatcggctgcggcatatgcgccgttcacccaaaaaagttacggataccaaattcgtaacaccatcatgcaagaactctgctatcctgtgttacgtaaagttaaaacgtaacactatgctgatgagagaacggttaatcgcatcggcatgagggcggagggaatcatgggagcatacacgcgccgtacattcgtaaagcttgccggcactgcagcggcaggcgcggcgttcggcggcatcctttcggcttgcgcgacgggcgccgatcctgcggcttcgaactcgcagagcggacaggccgcggacaccgcggcagatcaggtgatcgttgcgatgaataccggcagcgaaccggcggccggattcgatccgttcgtgtcgtggggctgcggcgagcatgttcacgagccgctgatccagagtacgctcatcaccacgaacgccgatatggagttcgtcaacgatcttgcgacgtcctacgagtgcagtgaagacgggctcacctggacgttcgcgattcgcgacgacgtgaggttcaccgacggcgaaccgctgacggccgaagacgtcgctttcaccctcaacggcatcagggaagccgatgccgccgaagccgacctgagcatggtcgacgaggtggtggccctcgatgcgacgacggttgagatccgcatgggcaaaccgttcaacgcattgctctatacgcttgccgtcgtgggcatcgtgcccgctcacgcgcatggcgaagattacggcagcaaccctgtcggcagcgggcgctacatgctcgagcagtgggataagggccagcaggtcatcctggcggcaaaccccgattactacggcgaaacgcccctgatgaaacgcgttatcgtcgtgttcatggaagaggatgcggcgcttgctgcggtcaattccggccaagccgacatcgcattcacttcggccacttaccacgatcacgaggttgcaggctacgagctgcttgcctgcaaaacggttgacagccgcggaatctcgctgcctacggtggagcccggggcgacgaagagcgacggcggaaccgaatatccggcaggcaacgcggtgacaagcgatatcgccgtacggcgcgccatcaactacgcggtcgaccgcgatgcgatgatcgaaaacgtgctcaacggctacggcgcgcccgcgttcagcgtttcggataacatgccgtggtcgtcggatgacatgaggatttcaacagatcgcgagcaggcgaaacgactgctctccgatgcgggctgggttgccggatcggatggcatccttgaaaagaacggtacgcgcgcggcgttcgacctgtggtacgcttcgaacgattcggtgcgccaggcgctcgccgccgagttttccaaccagatgaaagagatcggcatcgaggtttccatcaagggcggaagctgggacgatctgtatcccaaccagttttcgagtccgattctgtggggctggggctccaattcgccgaccgaggtctacgagctcaactattcgagcgggtggggtaactacgcctgctacgagagcgagaccgtcgacgggtatctcgataaggcgctcgcgcagtcggatgtggccgactcctacgagttctggaagaaggcgcagtgggacggtgccgaaggcattgccccccaaggcgcggcaacgtgggtatggctcgccgatgtcgatcacctgtacttcaagcgcgagaacttgcacgtggcccagcagaagccccatccccatgggcacggttggtcgcttgtgaacaacatcgatgaatggagctgggcttaggccttcgggcgcccgtaaaagcgatgacccggttcatactcaagcatagcgcgaagttcgtcctgctcctgattgcggtgagcatggtcacctttatcctcgtgagcatatctccgatcgatccggtgcaggcgaacgtcggtcaggcggcctacatcaacatgagcgaggcgaagcgcgcgcagctggccgaatactggggcgtcgatactccgatgtgggagcgctacatcaactgggcaggcggcttcatccagggcgatatgggcacttcgcttcgctataacgcgcccgtcgccgaggtgatcgccacccggttcgccaactcggcggccctcatggcggttgcgtgggcgatatcgggaacgatcgggttcgtcctcggcatcgtggcgggcgtgtaccgcggccgcttggtcgaccgcatcatcaaggggtactgcttcttgctggcatcgacgccgacgttttggctgggattggtgttcctcatcgtgttctcggtgcagctcgggtggttcccgttcggcttctcggttcccatcggcgtttcagccgccgatgtgaccttcgccgatgcgctgcaccatcttgcgcttcccgccctcaccctttcggtgatcggggtggccaacatcgcgctccatacgcgcgagaagacgatcgacgtgatgggaagcgaatacttccgcttcgcgcgggcgcgcggcatgagcgtgtggggggccatgcgccgccacgggctgcgcaacctcgcgctgccggctctcacgctgcaattcgcctcgatctccgaaatattcggaggatcggtgctcgtcgagcaggtgttctcgtatccgggcctcgggcaggcggccgtgacggcgggtcttggcggcgatgttgcgctgctcgccggcatagcggttgtttcggcggcgttcgtgttcggcggaaacctgatcgcgaacgtgctgtacggcgttgtcgatccccgtatcaagcgaggtgaggcgcatggctgacaacggtgccttcacctgcgggggagcgggcgcgcaggcgccgggcatgcaggatgcgcccgtcgtgcagacgacgacggctttccatgcgccgcgcgccgagcgttcgcgcaatcgtttgcgcacgcttgtcgtcctcgtagcgtccgttgcgctgctggcggcgatcgtgatctcgggcgtgctcgcgaccgacgcggcgatgcagaccgacttctccgcgaagaacctcgcaccgagcttcgcgcatttgttcggaaccgattggatggggcgcgatatgttcctgcgcacgcttgccggcctttcgacaagcgtgctcgtcggtttgctcgcagccggtgcctcgtcacttgtcgcccttgtgctgggggcggctgcggcgcttggcggcaagaaggtcgatgcggccgtgacgtggcttatcgaccttatgatgggcgtgcctcacatcgtgctgctcatccttatttcgtttgcgctcggcaaggggttttggggcgtggccatcggcgtggccctgactcattggccaagcctcgcccgcgtcgtgcgcgcagagatacttcagtgcaggcaatcgacgttcgtcgaggttgctcgcaagctggggaaaagccgcgcgaacatcgcggtgcgacacatgcttccctatgtgctgccgcagtttctcgtgggactcatcctgctgtttccccacgcgatcctccacgaagcggccatcacgtttctcggattcgggcttccgcccgagcagcccgccatcggcgtcatcctcagcgagtcgatggggtacctttctgcgggcatgtggtggcttgcggtgtttcccggcctcgccctcatcgcgaccgtgctgctgttcgatgcggcggggtcgaacctgagacggctcatcgacccgcatagttcgcaggattgaggttgggcatggaagagagaaccgaaagcgagaaagggatgcggatggcgagggaagccgacgacatagcggcccacgaagcggctgagcacgcttcggcgcacgtgcatcacggacactcccatgcgccttcctcgcaccatgcggggggccatcatcttttgcaggtggaagatctcacggtgtcgttctcgatgtacgatgtcgcgtcgggctcgttcttcggcgccaagaaggtggagtcgcgtgtgatcgatgcgttgagcatctcggtccacgtcggcgagatcgtggcggttgtgggggcttcgggctcgggcaagacgttgcttgccgatgcgatcctcggtctgtacgagccgaatgcatccgtgagcggccgcatctggttcgatggcgttttgcaggatgccgaatcgcttgccgccttgcgcggcaacggcatctcgcttgtgccgcaaagcgtcaaccacctcgatccgctcatgaaggtcggacggcaggttcgcggtttctcgggcgatgcgaaagatcgcgaaatcgaacagaaccgcctgtttgcgcgctacggcctcgacgagtcggtcgacgatttgtacccgttcgagctttcgggcggcatggcccgccgcgtgctgcttgcctgcgcgctcatcgagaatccgaagctcatcgtggcagacgagccgacgcccggcctcgatctcgatctggcggtggcggcgctcgacgacttccgcacgttcgccgatcgcggcggcggcgtgctgctcatcacccacgatatcgagcttgccctgcgggtggccgatcgcgtggcggtgttcaaggacggcacggtcgtcgaggagacggcggttgcgaatttcgcatcgcccgatacgcttgtgcatcccttcagcaagcagctatggcatgcgctgcccgagcacgggttcgaggtgatcgcgtgagcgtgctcgaagccagggatatcgtctatgcttacggaaagggcgatgccgtgctgaacggtgtttcgcttcgcgtggaaagcggggagcgcgtggcgctttcggcgccgtcgggcaccggcaagacgacgctcgcccgcgtgcttgcgggctaccttgcccccgatgcaggcgaagtgctcgtcgacggcgagcctcttccgaagcgcggcgcgtgtcccgtgcagatgatctggcagcatcccgaggcggcggtcgatccccgcatgcgcctgggccgcacgctttccgaagccggcgatgccgatccgtcgctggtgagcggcctcggcatcagaagcgaatggatggaccgctacccccacgagctctctggcggcgagctgcagcgcttctgcatcgcccgtgcgcttacggccgatccccgcttcctcatcgccgacgagatgtcgacgatgctcgatgcgctcacgcaggcccagatttggcgcttcctcgtatccgaggtcgatcgtcggggcatcgggctcgtattcgtgtctcattcgcccgcgctgaccgaacgcatcgcaacgcgcatcgtcgagctgtagaaccgcgctttcggatcggcttccgtctgagcgagcattcgggctttgcatgcgaggtcgcggcgaagcgtctcggtgcgcgtcgtcgggttaggcttgccgcatgcctcggttcagcgttcgggcaattcgattccgaagtccttttcgaggatcgtccggtactgcgcctccgattcgatcgtcacccgtttcttttcgccgtggacggttttcgtgaacacgtcgcctacgatggatacgctgccgtcatcggtgcgtctgttgacgtttctccattgggtgaataccgaatcggggtgcgtcgagcagaagtgggagagaggtacgaaatcgacctcgtcctggggcagatccatgaacgccatcactgcttcttcggcatccgagccgcaggcctttgcatcttcgcggccgcagtacgtaagcttccaccaagggccgtcctgccggtccatgcgaaaaacctgcccgcacgaaacgatgcgcagcccgtcttcgagcggaagggcgcatgcgggcatcggcccgccgtatcccacgtcgcagaacagcttttcgccatcgagcgacacgatggcgccgcggtgggcgatcggctgcgtgtagccgcggttcttaaggctccgcgcgaagcacggagcggcatcgaatcccgtctctgcaagcagcatgcagaacaacgcgttgagttcgaagcagtagcctccacgcctcctcgcgatcatcttgtcgaacagcgcgggcacgccgaggtctatcgtgcgcccgaaatcgacgatgtcgaggttttcgaacggaatcgcccgctggtgcgcggcgatcatgcggtcgagcgtctcggcatcgagcgggcctgcgggctcgtccatcccaaggcgatcccaataccgtgcgcgatccggaatgggttggtagagctcttcgtacataggtctcctttcggcgcgggcctgcgaagccgccgcatcccaggcgaaccgattctatagcttgcgccgaggcgcgcgcatcgccctggaagagccaataacgggcgatcgccgtcgaattctcgcgcagctcatcccaggagtgcgaggggtcgtacccacgcggggatgaaaatcggctcggcttagggcgggtggtcggatccgtgctttcctgtgctcggtacactgggcgggcctgcggtccctgcgctttcggatggcgggccggtgccgcttctgcggcgctcgacgaatcgtttcgcatccgtatcgacaaaggggttgtccatgccagagctctctatcgctcagatcaaacgcacgcgttctctctaccttgccctgtcgaccctcgcgctgctgttcctagggctcatatacgcgttctccatgttcgcggcgcccatgagcgcggcgttcggacttgacaaggcggctgtcggactcacgttcaacatcatgatgatcacgttctgcttcggggccatcggcggatcgcagatcgagaagagcctcggcacgaggggcgcccttatcgttgccgccgtgctgttcctctgcggcttcgcggggacggggcttttcggttacggcagcatcgaggtcgtgtacctgtgctacggtgtgctcggcgggttgggggtcggcgtgggctacaactgcatcgtggcaacgacgaatctctggtttcccgataaggtgggcttttcatcgggcgtgctcatgatgggtttcggcctcggatcgctgatcctcggcacgctgtcggtgaacctcgtcgcctcgatggggctcggcaccgtgtttgcgctcatcggcgtcatcacgtgttcggtggtcgtcgtgcttgccctgccgcttcgccgcccgcccgccggtatcgtccagcgcatggctcccgagaaggcgggcggttcgggctatgatcccggcgagcaggatgcggccctcaagacgccgacgttctacgtgtactggatctgggccatcatcgtgattgccatcggcctcgccaccatcggcaactgcgcttccgacgcgcaggcggtcgggctcgatgccggcttcgcgacgctgctcgtaggcctcgtttcgacctgcaacggactcgcccgcgtcgtgatcgggctcatctacgataagaccaacgtgaaaaccaccatgctcgtcgacggcctgatcgccgtggtcgcctgcgcgtgcatcatcggtgcgttcacagccggcatccccgcgctctacgttgcgggtgcgttctgctgcggcttctgctacggtggcgtgccggttgtggcttcggcgttcgcgcgccagcggttcggcgcgaagagctacccgctcaacctgtctctggccaacttcgccatcatgttcggctccgttctcaacatagtgattcaggcggcggtgggcggagctgacaaccgccttgccgtgtttgcggtcatgggcgtgctttcgatcgttgcgacgcttgatgtgctgccgttctccaggctgtggaacttcgacatgcgcaggctcgaggcgcgcaggaaaagcgccgaggcgggcggtgggcggtaatggccgcgaaacggggcggtcgcaggatcgcggcgctcgaggagatctgcgcgcttaagggcaagcgcaggatggatatcatcaaatgcgcgttcgccatcatggtcgtcgttttgatcatagcgggaaagcccctgctggagacgatgggaatcattcccgagggcagcatggtcgcttcggcggccatgttcctgtccgcggtcgtactggctgttttcgcgggttcggcaagcaccgatttcgcgaagagcgggcgacgcatcgaggagctttgcgcaaagcacgcgatcacgaaagacgacgtgcgcgcctacgagcgtctgtgaatcggagttgattcgacgatcacgcgcggcggttcgggccgagcggtccgcgcaaagctccctcggaatgcgtcgggtcgtcggtctcctcgaccatgaggagcagttcttgctggttgtggatgttgagcttgcggtagatgtgcccgatatgggttttcgcggtgctcttcgagatgcagagcctgtcctggatgtaggcggcgttgtatcccttcgccaagaggaacatgacttccgtttcgcggcgcgaaagcagatagcggtcggcgatcgtctcgcattgggctctgaagcgaccgcttttccgggcggtgtctgcttcctcggccgatcgcgtcgacggtcccagcgaggcgggtttctgcgcgggcgatgcaatgccggcatgtcccgaacccgctgcatgccgaacgccccccttctcgcgcgcgtcgtgcgcgccttttcccgtatcctgggcgttcggatgccgcccgggttcgtgttggacgcgaagacgttcctctcccgcggatgcgccgccggctctcacccgaagctcgccgctttcttccgtgtcctggacgcgccttgacgtttccgcagcaagttccgcttggcggttgaacgtggcgatggcgggatagccctccggttcgggggcgatgacgatgcgtttgatgtcgcgtacgcgcggcaggagcgcatatgccatcaccatgacgaacatgatgagcacggcgccgcccgcttcgccgaaaggcgtcagcgatccgaggatcgagggatcggcaaccgaaagcgatccggcaagcgagccgagcgcgaggcatcctcggccgatcccgaacacgaagataggggacagcctgaactcctgcgacatctcgccgaagaacacccacatgagcgcctcgaagcacatgtagccggtcaggagtaccagtggttcgagcaccgagtttcccatgggcagcgtcggcaggaagaacagcgtaacggcgatgaacgggataagcgggcgaaacaggaaatcccagtggccgcgcttgtcgaggcagaacgaggtgacgagcagcagcacggtggcggcgccgcctgcaatcagggcgagcagctgcgtggtcagatcagatgacggcaagatgacctgagtcgatatggatcgcagcgcaccgagggcgaagccgaacagaagcgtgggcaacgcgagtctgatcgagaagggcggctttcgcacggggagcgggttgaagatgggtatcgcgtggcgcaccgcgtagctgacgggcgtgagccgccacagaagcggaagttcgagcagcggcaggcagcaggtgaggatgcccgaaaacggcggcgggatgatctggaggacgaacgagtacagggcgatggcgatgacgatggccacggccgtgttcatcacgatggtcgccgctccgtggcgcgaaaaggcgatgccccagaacagaagaagcagagcagaaccgatgccggtcgagatgccggcgaacagcgttgcggccgcgccgagggctcccggcgcgtttgccgcgaacacggcggccgtgccgatggcggtcagaacggctgcggcgatgatcacgcgttttgcggtgtagaacttgaggaagcgctgatcggtcattgcggcgagcagcagagatatgccgaacacgacgatggagatgaggaagacgagcgatatggacgattgcgcttcggggccgagtgcctggggaacgtggaagatggtcgtcgtgccgaacattgccgtgtagatccacgattggtggatgccgaacccgagtgcgagtatgttcagctcgccttgcgttcccgtgcctcgatcgtcgtctaccgtgatgctgattcgcggaaacgtgatagccataagcggaacctcgcttttcccctgtcgttgcggtcgagtgatcgcctagcgattcccttcggcgcacggccttctgcgcctcatgatcgtgtgggagccggccgagcccccgaaaaacactgttcgccatcataaacggaagcctctccctgttcaactatcgataaacgattaattaggcttctcatcagcatatatgctatccctcctgccgcaagatcgataaaaatcaacctctggggtcgatggtttctcctgcgaaaacgcatctttaccgccgtgcggcatagtacggcgtcgtctttcggaaccccggttcgccggatgcgaagcccacttgggctctgcggctttcgcttgcgttcgcggcatttcgataaatcgatccctcggaccgatggggccaggggaaagcgtcccggcgagccgatgaccgctcgatttcggttccgtacccttcgatgtgcttgattcttttgcagggaatcgactgcggttgcttctgcttgcaagggaaacgaaaccgggaaagagaaggggaaagggggcgcgcgcaatcgtttcttctgggcgacgagcgattcggtcggttgagagagccgatggaaacggcgatcgaaactacggaagcatccgttattttcaggcgtgaggtcctgaaatactgaagcatccgcatcgcggcgcgaacgcggtcggacccggtcttgctattgcgtacaaggtgatttcagacaaatggctggcctgcgctttccgtaatcgggagcgtccagccaaacgatctcacactgaaggggggactgatggataaaaaagagttcacgatctcagaggtcatcgactctattggcatcagctcgcatacttggatagtcttcgtgcttttggcgttcgccatgatcttcgacggatacgatttcatgatcgtcaattcgaccaacctgttcgtcgcgcatacgttttggccggataacgccaatcccggcgcgctcatgggctcgctcaccacatggggcttgctcggcatggtcatcggcggtgccgtgggaggcatcatgtccgacaagctcgggcgcaagaaaacgctgatcgccgccgtcatgttctacggtttgttcaccttgccgcaggctttcgccaacgatctggcgtttttcgccgccttccgcctgatcgcgggattcggcgtcggttcctgcattcccgttgtcacgacggtgttctcggaaagcatgccgtccaagcagcgcggcgtgttcgtgacgttcggcatggccttcatggtcgtcggctgggttctcgccggcctcatcgccaacccgatctgcaatgccccgacgccgctgctcggcgaacttaccaaccaggtaacgtacatgactgccgacggcggcacggcaaccatgtacgcgaactggcgtctgtgctatctgatcggcgccattcccttgctctacggcatcgttctcatcttcacgatgcacgagacgccgcactggtatgcgaactccggtaacaaggagaaggcttgcgagcgcctcactcagatcgagcaggccacacggcatacctcgcacacctacgacccggctctgctcatcgtgcctccgaagcctgcgaagaccgggccctcggttctgttttcgagcaagttcatcgtggcgacgtgcgccatctgggccgcctatttcgtgggccagttctgcgtgtacggcatgaatgcctggattcccacatggttcgtgggcctcggatactcgtcggccgatagcgtcgcgctgcagacgtggaacaacgtggcagccatcgcatcgaacatagccgtcggtttcgtgtcggacaaggttggccgcaagcgcaacctcgccttctcgtggctgttctgcatcgtggcgatcatcctgtgctctttgttcgtcgccccgaacaacatgggcctgtgcatcgcgctcatgctgctgttcggcttcgcgttgaactacgcgatcaccgccgtgcagcccctcatgccggaaagctatccgaccgccatccgcaacaccggcacgtcgtggtgccaggcgttcgcccgcttcggcggctccgcctcgtccatcgtgctcggcggcattgcgggcatggcgttcttccaaacggcaaccggtgcgaccaactggagcacggtcgtactcgtcctcatcgttccgttcgcgctcggattcgtctgcacggtcctgttcgtgaaggagacggcgggcaaatcgatggatcagcttgcggcggaagaggagaagctcggcgcttccgagagggacggtgccgtgcgcttcgtcgtgatgctcgtcatcgtagccatccttgcgattctctgcatcgtgtgcccgctggtggttgaaaactggtcgaagcagccctacgcgctgccgctcatggcgatcggcctgctcttgccgttcgtgtacttcttcgtattcggcggaaagcagcttgcgaagaacaaggccgctgcgaaatagcatctcgccgcacgtgcgcgtggaaaacgtaaaggaacccccggtcagggggttcctttacgtttcgggagcttgcggtgcgcttcttgggggcaccgctgcgggcttgtcagcgggaggcatcctcttcgaggagctgctcataggttttccccttgcctgcgaacagccagttcttcgccttttcgagcctcgacgcgttcggattctcgatgccctcgctcagtccccggtactcttctttgatgcccattgcgatgacggcggcgacggctatcctcagcttcgccacgtctttcgccttgatctcgtagcattcgccgcgatccatgaattcgaccacgcgcacgtgcacgtctttgaccgaatcgtcttcgcgcacgaagtcgagcggcggctcgctgagggttccgtcgatctgccagcgcatcccgttgacgtagtagtcctggaacaggcggcgcgtgtggaacacgtattcccagcgctcgagcttcagatagtacgcaagcgctttggcgtcgggtttgacggctcccatctcgcctcccatgcgcccgaagatcgcaatctcgctcctctcgctttcccatgcccccctgatgctcaggaaggtgtctccatcggcgtaccacacatcgaaatcttcatggcgggcgaatgcatccttgggcagataagccttgttgttcttcacgggacctcccgacgctgcttttacgttggcgggattatagcgcatcgaagtgattttacacgttgcgaggatgtgaaaaaaagtacctttgaactggggttataaaaacacccaaccctacagtccgacgaaaatcaaccccgcaggacgatggttgcagcagcaaaaacgtccccctgattcgatgtcgctcgccgcgcagtccgtaagctgagaaacgccagatgcttcgagctcatccgcgtcgtgcagggtgctgcacgttcgttgataacacgaagttgaagcccgaagcttcgagctcatccgcgtcgtgcagggtgctgcgggcgtgggtgcatggcatatccgagggtctgaagcgtggtgcgcgtgcgctgccgaacagaccgaagcgatcgacgagagaggttcaccatgtgtttcagaccagctgatgcatccgccggcggcggcatgaacaaatgccccgagtgcggcaagaccattcagatgatggcgggcgtcaccttgaagaactgcccgttctgcaagtgcgatttcacgccgtatctcgacggcacgaagccgcttcccaatgcggctcccagtgccggcgctccgggcgcccccgctgctccgggcgccccgaaagcgccgggagcccctgccgctcccagcgcaccgaaacctccgaccgcttagcgcaagcaggcagagcaccgtgcaggagggcggcgatcggttgatccggcgccgtccgaggggatcgaggaggtgatgcacggaatcgatagcgtccgaaagccgcgcacggcatgcgcggcgagtttccaaggttttacgagtgagtgaagcgagtgaaccaaagaaagaaggaaggaaaacatggcatacggtaaacaatggcaaaccgtgaacgaggatgggacggtcgtaacccgcagcaacacgtggtcgcctccggggagccaccctgtcggatacggcgtcaaggtcgtgacgaaagacggcgagctcatccgtgtcgagggtgacgacgacaacccgatcaccactggccgcgtcaacgcgatgaaccttgctctgcgcgagtacacttacgctcccgaacgcatcatccacccgatgaagcgtgcgttcgaggatcgcggcaaggataagtgggtcgaaaccacctgggatgaggctctcgacaccatctgcgagaaagtgcgctactatcagaacaactacgggcccgaatccatcgtggtcttcggcggcaccggtcgtgaggcgtgcattttctactacgcgctcacgttctccgtcctgcagtctcccaattgctgctatacgcagtctgggtggtcgtgctacggaccgcgctgctccatcgccgactacgtgctgggcgcgggctatcccgagctcgattacgccggccatcttccgggcagctatcaggatccgcgctacaccgtgcccaagtggatcgtcgtgtggggcaaagagcccctgccgtccaacggcgacggcttcttcggccactgcctggtcgacctgatgaagctcggcaccaagatcatctcgatcgacccccgcatcacctgggtcggctcgcacaacggaaacatcaacctgcaggtacgtccgcagaccgacaccgcccttgcgctcggcatcatgaatctcatgttcgagagcggcgagtacgacaaggaattcgccgagaaatggatctacggcctcgacgagatgaaggcccgcgcggccgagtatccggttgaaaaggtctccgagatcaccgacgtgccggttgaggacatcaagcgcgtcgcgcacatcatcggcaccgagcgcccgatcggctgggcgtggggtttggcattcgaccagaacaaaaacggcgtgcagctttcccaggcgttcatcgtcttggctgctctcgccggttcgatcgaccgccccggcggactgaccctcggacctccgtcggcgcttctcggcaagtggcgcatggagcagcgcggcgctatggacgacgatgtatggtcgaagcgcatcggcgccgccgcatggccgggcctgtcgaccggcatggcgacgacccagcccgacgagacgttgaacaccatggagtccgatgagccctatgccttgaagatgggctggttcaacagctcgaacttcctgactcccacctgctcggcgcaaccgaagcgctggcataaggccctgcagaagctcgagttcgtggttgtccaggacctcaccatgaccccgacggccatggcggtgggcgattacttcctgccgatggcgacctgggccgagcacaacggcatcgtgctgacgcactatggtcgcaacaccgtgttcatgggccccatgaacaaggcgcttgaagtcggcgagtgcaagtccgacgtcgagatctgcctgatgttcgggcagcgcctcaacccttcgtggtggccgtggtacaagcccgccgacggcaaatcgctcgatcttgatgctttggcgcaggccgtcgaagacttctacagcgatcagctgaaggaagtcggctacgactggaattccttccgcgaggcggggctgtatcagcccggtgcccatgggttcgagtatgagaagtacgagaagggcctgctccgtttcgatggcgagcctggcttcaacaccatcaccggccagatcgaagcctattcgattctgtacgagtcctggggcgaggatccgctgccgtactacgaggagccgaactacagccagatcagcaagcccgatcttgctgctcagtacccgctgttctccacctcgggttcgcgccgctacagctcgttccactccgagcatcgccacgtgccgtcgctgcgccagatcgatccgtggccgtgggttcagatcaaccccgaaaccgccgaagagtacggcatcaccgacggcgattggtgcgaggtttacaacatgttcggcgaagcccgcttcaaggccgagataaccccggtcatcaagcccggcatcttgaactgcgcccacggctggtggttccccgagcaagatggcgaagaacccaacctgttcggcgtgtggaagtccaacttcaacagcctcgtgccgcacttcaacgtcggcaagctcggcttcggcgctccgtataagggcgttatgtgcaaccttcgccgcgtccgtagtctcgaccaggactaacagaaaggaagtggcataaatggcagatcagaaatacgctttgctcgttgactacacttatttctccggcaatcacgccgcagagatcgcctgcaaagaagagctcggccttcccatcgaccagttcggcatcaaagaagtcgagatcggtccgttcaagaagggcgagggcaacgacggcgacgcgtgggagtggttctacattccctgcccgacgtcgatcttctccgatcattgggggacgaacggcgacaaggccggtcagcgccccttggccgtgcaggttgaggaatccgcatccatgtactacggaaccctcgaggacatgaccgccaagatggccgagttcgaccgtccgatggttctgttccaactgtaagcagtacgaatgcagcgactgccgcggccgtcggcccgcctggctgatgaccgcggcatccgtgttgaagaccgacgaaggagggcaacatgaccgaagatgagttcttggcgctcgacgctcgcgagggcgctgagatgctgaatgcgcttttggccgaaggcaagagccaggatgaggcgatggccgagttcgatctgactaaagcgcaccttatgaaggcgcagatcttctttgtgaaggataagttcatcgcccgcgcgtggggcggctatacctccacgaagcgaaccggcaacgaagccggcgatgctgaaaacggcgtgggcgccagcgatccgtcgaagggcatcctgggcgtttaaccgtcgttcgccgactgcgggaggcccggcgaggtttgcgggcctcccgcggcggccgacggcgcatgattcgcggatccgctcgatcgccgcggcggagatgcgcgcggcggcgatcgcaaacgaatgcaggacaggaaacaggaaaggtgggcgcatggcaaccgaagaggacattctgacggaaatcgaacgctgcgggcgtttgaccccggagcaggagaacatcctgtacaacataagcttgaagcaagacgagctgggaagggaacccgtgaacatgctgttgagcaaggtgcggggcagctcggtttacgagccgatgatcgagcgcgagtttttgacgtacgatgttttcaaccacggaagccgccatgagatcgcctgcctctacgttaccctgaaaggcctgcgttactgcatcatgttcgccgacgagctttcgcgccgccgcaagctgaatccggcaggtgcgccttggcagaccgtcgccgcaggtgcggaggtataggctatggagcttggttctacggtaacgctcgcctatacgggaaggctcgacgacggcacggttttcggctatgcaacgcatgagaatcccatgaaattccaaaccggcatggacatggcgatcgaaggcttcgagaatgccgttctcgaaatgaacgaggcgggcgagaagaagacgttcatcgtcgacgaatacgaagcgtacggcgaatatcttgaaggccatacggctcggattccgatcgaacaaattcccgtagacgggatcggggtgggaaaacgggtctggctctcgaacgccgaggacggcgcaccggttcccgcaacggtcatcggggtctcggacggcgtggccacgttcgatctcaaccatccgctcgcgggcaaaaccctcatgttcgaagtggagctccttgaggtcgaggatgcgcctgaaaacttcgtttccgcagccgagaaggctgctcatatgaaggagcaggcgaagatgctgggcggcgatcagggcgacgactaccgctgaaaacgcagcgcgcccgctttgcgcttcggtgcggcatggatgcgcgccgaggcgcggcatgccggtgggcgttcgttcgggaaggccgaaaggaagcgaaacgtatgtgttggtcctgcaatccgatatgcggcggctgccgacccccgcgcaagcggccggtgaagtgtcccgaatgcggcgccttcaacgcggtcgacctcgagcggggaggccgaaagctctgcgtgaaatgcgaagccgacctcaccgagctggctacgccgaaaccgaaggtctgccgctattgcggggaggtctgctacaacccctgccgcaaggccgatcaggatccgcccggcggcgagatcggcagatgccaggtgagggtgaaagagccgctgtaggcgctgccgcgcgttcgacgggcgggcctcggggcttgcgatgccgatcggcgaaggcctgcgggttgatccttgggatcgctcgcaggcctttcgcgttcttgcaggtgatcagcgcgtttggggagcgtcggattcggggatgaggcgattatcgctattcttatgccaggctaatatgcgcgattcagttgatttttcgttgactatatactaattaaagaataatattgacggcatgccggaccgaaaaacggcattcgaactgtaaggaccaaggaagggaacatatgaaaaagcatatgcgcatcgtgcttgccgccgtcttctcgtttgcgctcgtcggagcgtttgcgcttgccggctgctcgtcgcagccagctgaagagcccaagcaggaagagaacacgcagacccaggaaccgcaggagaccaacgaccccgttgagctgcagatctttgcggccaactcgctgtcgaaggcgatggaagaagttcaggatctttacaagcaggatcacgattgggtgacgttcgccgatacacagtacgaggcatcgggcacgctcaacgaaatgctcggcgccggctcgtacgccgacattctcatcacggcgtccaagggcaccatggacacggccgtcgacgaaggctacgtcgatgcgaacacccgcttcgacatgttcaccaacgagctcgtcatcgtgacgggcgagggttccgacatcgagaagtcctcgctcgaggacatcgcgaccggcgagtacaagatctcggtgggcgatgacaacgttcccgccggcaactacgccaagcaggcgctttctacgaccgatccggcgtgctggatcgaccccgacggtaagacgggctccgattctgcgggcaagggcggcacgtttgcgggaactccgcttgagggcatggtcaccgagggctcgagcgtcggcaacgtgtgctcctacgccaactccggcgatgttgaccttgcgatggtctacagctccgacgtgtaccgcttcggcggcgtgaagatcgtgggcaccgttcccgcagacacgcacaaaaacatcatctacccggccgccatctgcgccgagtccgccaactccgaggccgcgcaggaatttttggattgggccttcacgaacgaggatgccatcaagatctggcaggagtggggcttcgagctggctgcgtaagccgtcgtttgcggtatgattaagcgcaacgcgctttcgatgggggatgggaggccgcgctttccatcccccgttcttgcgcggggctctgcggtgatggatgcgatgagaatggggaaacgggatggaaaaacgcataagcgcccttgcgatggctttcatgctggtgtttgccacgctctgcccgggccttgcgtttgcggatgacgatgcttctctcggggacgttcctgcaggcgagcccgcgatgcccggggggtcgggcggttcttcttcgaacgattcgacggttaccgtcgacgacgtcgtcgtttcagccgaaggcgaggcggctgccatagagggggcctcgttcgctgtcgacagcttcagccgcgcccaaaagggctcgaaccgcgagattgacggccggtatctcgggtacagctattatcagggctcatcgcccgactacgcggttgccgttgcaaccgatgattacgtgctcgcctacatcccgccttccgcgcatgcgctctgcgatgttgaagactccgcttcccaagacaccctgaagcggtactttcttgcgctcgacgaggtatcgctgacgggtggtatcgttatggacgatacggttccgtggtattttaccagcgagtccagcatggctctcgacggcattctttaccgcttcgccgtcgaggcgggcgagggcaaatactacgtgtgcgctataggcgaagacggaagcgacgtggtgtcggctgccgccgagggcctcacgcgtccgacccacgttgattttctcaagatcgtcgaacctggcgccgtcgatatcgtggcggcatcttcggggcttgcggcgttccaagagtttctcggcggcatcgatttatcgcctttgtgggtgacgctcaagaccacgggcaccgcgatcgtgttcattttcgtgctcggtctggctgccgcgtattttactctgcgcatctcgaagcgcgctcaggacatcttcgataccgtcttcacgattccgatggtgctgcccccgactgtctgcggctttcttctgttgttgctgctcggtcgcaatacggcgctcgggcagtggttcatcgatatcggtttcccgcttatcttcagctggcaggcgacggtcatcgccgcggtcgttgtggcgtttccccttatgtaccgcagcgcgcgcggcgcgtttgaggggctcgatccgaacatgctcgacgcggcgcgcacgctcgggtggtcgaatgccaagattttcttcaaactcatgcttccgctgtcgtggagttccatcgcagccggcacggtgctcgcgtttgcccgcgcactcggcgaattcggcgctacgctgtttctggccggcaactacgtcggcatcacgcgcaccatccccatcgccatttacttcgagtggatgagcggaaacatggacgtcgcgctgttctggacggtcgtcattctgatcttcagcttcgtcgtcatcctgttcatcaacctgtggtcaagacggacgacgcgttaccgtaagggggcggccgaatgagcctcgaagttgccatcaagaaacgtttttcgggttttcagctcgacgtctcgttttcggccgaagacgagacgctcgggttcctcggcgcatcgggatgcggcaagagcctcaccatgcgctgcatcgcgggaatcgagaaacccgacgagggccgcatcgtggtcaacgatcgggtgttcttcgactcggatgccaaaatcaacctcacgccgcaggagcgaaagaccgctctgctgttccaaagctatatgttgtttcccaatttgacggttgccgaaaacgttgcggcgggcatagggaaggatgtctcgaagacggatcgcaaagcgatcgtgctgagcgaattgaagcgcttcggccttcaggggttcgagaatcgctatcccgcgcagctttcgggcgggcagcagcagcgcgttgcgcttgcgcgcatgcttgcggccaagccgggcatcctcatgctcgacgagccgttctcggcgcttgacgcccatctcaaaggcgtgctcgagcagaatctcgtaagcctgttcgacgcctacgacggtacgatcctctacgtgagccacgatatcgacgaggcgcttcgcttctgcgatcgcatcgccgtggtggaggacggccgcatcgtggaggagggtacgggcgacgatctggtgaaccgcccgcagagccaggcgggcatcaagctttcagggtgcaagaacgccacgcccgccgagtatctggacgatcaccatgtccgcctgcccaaatggggcatcgaactggctaccgagcaggaggttccgaaggatgtcaaatgcttgggggtgcgcgctttctttctcgaacgcgccgatgcccccggcgaaaacgtgttccgcgtgcgggccgatcgcgtgagcgattctcggttcgatcgtacggtgctgctcggtttcgccgagcggaacgagacggacgctcctgccgtaaccgccgacgaagacgatatgaagtacttgcatcagcacgtgttctggcgcgtcaacaagctttccgtcgaatcgggcatgctgccccaggagggcgacgagctccttatccgcattccgaaagacaggctttacctggcgagccgatgacacgttgttctgaacgcacccgatgggagtccgcagcaggttgtctgtccgcgttttggacgggcttcggggcggcttggatggatgaaacgatacgaaacggggcgaattatgacattcgcctctgtttgttgcggatggcgcggctcttttctccgaggagcgctataatatcctttgttgaggagaagggaaggccggcatgaaagactcacatggccgcactatcgattacctgcgcatctcgttgaccgatcggtgcaacctgcgttgcatatactgcatgcccgaggagggcgtcgatcagatgtcccacgaggatattctccgtatcgaggaaatcgaggaagctgtcgccgttgccgctcagatgggcatcacgcgcgtgcgccttaccggtggggagcctttggtgcgcaaaggcgtcgtcgaccttatccgatccatcaagaacactcctggcatcgagcatatcgccatgaccaccaacggcgtgttgctgcctcgcatggcggacgagctgaaggaggcgggtctttcgcgcgtcaacatctcgctcgacacgctcgaccccgatcagttcgccatgatcacgcggcgcggcaaactcgaggatacgcttgcgggcatcgaggcggcgctcgccgtcgggttcgaccccgtgaaaatcaatgcggtcgctgtgcgcagcctgaatcaggattacctcgcctttgcgaagctctcgatcgatcgagagctgcacgtgcggttcatcgagtacatgcccgtgggcgaaagctcgggcggcacggggtgcggctggggcaaagaggacgtcgttccttccgaagagcttatcgagatcatcgatcggcaggcgcgggccgagggaatcggcggtttgattccggcggggggatcccgtcccgagggctgggggccggcgcgctactatgcattcgaaggggcacggggcacggttggattcatctcgcctctttcgcgtcatttctgttcggagtgcaacaggctccgtctgactgccgacggcaagctgcgcccctgtttgttctcggatgtcgagttcgatctaaggcccgctcttcgagccggcgatttcgacggcgcaaaggcggtgttcgccgaggcgttgggcgcaaaacccgatgatcatcacgacaaggtgggcaccgagcgcggcatgtcccaaatcgggggttaggacgatatgcggaggcggtcggcaggaccctctgccgcattgcgcggaaagcgaaaggaaatgaggatacgatgaccgaacagaatctgacccatatcgacgaaaagggcgaagtgcgcatggtcgatgtgtcgcagaaggccgacacggaacgcgttgccgtggccgaagggttcattgccatgaatcctgaaacgctcgatctcatcgtcgaggggaaggcagccaaaggcgatgttctcgcgtgcgcgcgcgtggcgggggtcatggcggccaagcagacatcgtcgctcatccccatgtgccacccgctcaacatcacgaaggcgaaggtcgatcttgcgccggttgtcgcaggggagcgcgaggatggcagagtcggcgttcgcgttcttgccacctgcggtgtgaccggcaagaccggaatagagatggaggcgcttaccgcgtcgagcgtcgcatgcctgaccatctacgacatgtgcaaagcggtcgatcgcggcatggagatcatggacgtgcgcctgctcaagaaggacggcggcaagtcgggtttgtgggagcgcaactagccggcttcggcgacttcctattccgcgctgcattccaaaagatccgtctgtttcggcggcgttttgaaaaacgggcatcagctcgcttcgtctgaggcgagctttttcatttcgtccacaaatagggcgccgttttcggacgaggcgaactcgtcggtgtagacggcgtagaaatcggtcttgaacggcagatcgacgagcgagaacgcgcggcactcctcgcgctctccgatgccgaagcgcggcatgagcgttgtggggacgataccgaaaagatcctgaaaatcgtagttgaagtattcgaagtgatcgccgaagctcatggtttgcagcgctacgcgcgcgccgtgttcctcgaatcgctcgactacgccgtcccgcaggtacccttggtagatgtcgggaggtaccatgatcgtcgatccgtcgaggtcggcagcgcaaaccgtatctttgcaaaaaagcgggttatcctgcgtcatgagcagcttgatgtcctcggtgcgaagcttgaacccctgcattccttcggggatcacgcggttcgcgctgcccgacgtatagcttttgcagcctgcaactacgatgtcgttcgcctgttcgcgcagcgcatcgatggtgctgtgcggtccgttggccgtcacgatgtcgattctcttttcgggatgccgcccttggacggcgtggcgcgccttgtagagaagcgattcgagccaggggaggttggtttgggcgaccgtcacggtgagcaggttgtcggcaagcgtttggtactcgtcgattatcccttgcaccgtttcaacgagctttgcgcccgtttgcacgaaccgtctgcccgccggtgtgagcgcggctttaccctggcattttccgacgagttcgcatccgagctccgtttcgagttcccgtatatggtcggatagcgttggccgggtgatgaacagccgcttcgcggcgttcgaatagttgagttccgccgcaaacacgagaaactcctgaacgtaacgtgtatccatcgatccccttccagacgatgaattccggcccctgcctttcctgtcgaaccgcgggcttcgatgccgggttcgacctccagcggcgggcgccgactccggttgcccccttcccgaggcgacgggagttgtaaaaattattttacatcgtttcgacacttttgaacatgggaggcaaatatcgcgacacgcgtggaaaagagcctccggcatctccgatggcaacggggatacgattggcggtgagtttggcgccgggatgacggccggcgccgttcagggaagaggaaggggattgtcatggagcttgatcgcaggagttttctcaagggcgctgcgctgcttgggggcgcgggggcgctggccggcattgccggttgcgcgcccgctgcggaaaaaacagcgggcgcaggcgaggggggcgtagcgcccgaggcatcggcgttcgaggccgccgcttcccccatcgagccggtggagccgcccgcaacgtgggatgaggaggcccagatcgtggtcgtcggttccggggcgggtggcatgaatgcttcgattcgccttgctcaggcaggttatcaggtgctcatgctcgaacgcagcgaagagacgggcggcaactcgaagcactcgtcggtattctcgaacatcggggggcacaagcaggccgaagagctcgggtgggcgtatccgtcgtatccttacgacgtcgacaacatcgtcgaattcttcatggattgccagcagatgaccggcgaccccgatcttctgcgtgcgatggcgaccgagggcccgaagtgcatcgattggatgaacgagaaggcgggcgcaaagtgggttcccatgaatccctcgcctgcgggtgcgggactgctcgagtgggagggcatgtcgacgcccacgaacggcatcaacgtcaatctcattccgttccaggaacttgagcagacggcgcgcgatgccggagtcgagatccgcacgagctgcacggtcgatacgctcgtgttcgatggatccgcagttgtcggcgtgaaggtaaccgaccagaaggaggagaaattcatcaaggccgatcgcgccgtcgtgctcacggcgggcggcatggagatgaaccgcgccatgatggcgaagcattcggcgacgtgtttgcacggcatcgcgaacatcgccacgccgccgaacggcacgggcgagtgcatcaggatggggcagggcgtcggcgccgacttgtcgggctacgattcgagcggcgcgttcgacggcggcgtatggtggcgcgactacaacgaattcgacaccatgatggactctcacataaacaaggacggaaaccaggcgctgcgtcagccgtggttgcgcatcaaccgcgatggtcagcgggtgcccttcatctcgacctccgcgacgagctatccctacaacaccgatgccgcgccttcctcggcggggctgtgcgatacggctgcgatcgagatgaaccagccgggcggcaaaacctattgctgcttcgattcgaagttcgatcagctggtgaccgataacttcttcgggcagatcatctgccgcaaagcgaagatcgttgcagacgacgatccgtacatcgatcgcgtgcccgagtggctgcgcgattggcatacgggcttccagcagatggtcgatgccggagccattgcgaaatgcgatacggtcgaggagcttgaggaggcgctcgggttgcgcggcggcgtgctcgtcgatgcggtgaggcgatggaacgaagcgtgcgaggcgggcgaggattatgcggtgtcgtacaagtatccgcccgagtggatgatcgcgatcgacgagccgccgtactacggtgcgaagctgggcggccatgtgttcggctcgaaaacgggtctgcgcattacgccgaagatgcaggtggtcaacaccgacgggcaggtcatccccggcctgtatgcgggatggcatacagctgggggatcagcaggcgagggcaacccctccggcaagcctctgaccggcatgtacgccgatctcggccttgcctttgtcggaggatacatggtggcgggcggcatcctcgacgaagacgggaagagcgaagcgtaaagaggcatcttcgcgcaagagggcttctcgcgcgtgcgcgcgaagcgccgccgggtgccgcggcatgcgcggcgatacccctgctgtcaaaaccgacgacgcaaggcccggctctcttctgcaaaaaatctgaattggggtcttgtcaactaatagacatgatcatataattggtatggtctgaaacacaggaaaagccgcattcccccaatgcggcttttcctgtgtttgatgctgctggaaggaaatcggatcgacgggacccgatttccttgttttccgaatagctacttcgagagtatttcgccggcaagatatccccatgtgagtgctcggccgttcgagttgccggccatgttgatggggtagtcgaccgcgtagatgtcgcccgatgcgttgccgatcgcgtacagtccctcgatgggctgcttgttcgcgtcgagcacctgcagatcggtgttgatcttgagtccgccgacgatggcgagcagtgcgacgcccaccttggcagcgtagaagggtgccttctcaacggggaagaggtactcgctttgcttgtggaagtcgtcgtctgatccggcggccacgagttcgttgtagcgagccaccgactccttgagcttgtctgcgggaatgcccgtgagctcggcgagctcgtcaagcgtatccgccttgaacaccttgccgtcgtcggcttcgagacccgtgttgacgaaatcgatgtagtcctgtgcgacgaagggcgctcccacatcgccgcccatgatgtcccagaacatgcctccgccgccggagaactcgagcgttttgacgttttgctcgccgaagtcggcgtcgaagatcgaccaggcgatatcatcggtctggtgcatgacgttcatcgatttgccctgaacccaggttgcttcgttcatgaagcgctcgccttccatgttgaggaacatgaacgcaccgtggaactgcaggcccgcctgcggatggagcatgagggggaagggtccgtcctgcaccgtgccgcctgcccacatgcccattttgatgccgtcgcccgtcgagtagccaaccggcgtgttctggcattcgagtacgtgatgaacgttttcctcgcagtaataatcgaccatctcgggatcgtcgtggatgccgccggtggctatgatgacgcccttgctcgccttgaagagcagcacgttgtcgtctttgtcggtagcgaatacgccgacgaccttgtctccctctttaagaagctgggttgcagtggtttcgaagcggtactctgcgggcttgctgtgcttttcggcgtccttcgaatcgacgtagagcacgttggttgcttggaagtaactgcattcggcgggccactcgggcgtcgcgtcggttttgtgaaattggtggtacgagaacgattcggggatgatcgccttgggcgcataggcgcggaacgaatcgggttcaacgccgtattcggcggctttgtcgatgagccagtcgccggcttcgcccgatttgttgaaccacagggaaacgagcgcttcgttcacgcggctgccgcagctgcgaacccagagatgctgggcctcgggaatgttgacggtgagatcctgtccgatcgattctccgtaggatttggtgaacttggtgttgcacaggccgattccgccgccgcgcccctgtacggtgctgagcttttcgagcacgatgacggataggtcgtggtctgcgcacgatgccgccgccgcacaccccgcattgcctgctcccaacacgatgacgtctgcttccagaacctctttggcatcgctttccgaaagcggggcgggcgcggtcatgaacgacgggttggcgattcgcccgtagcccatggtggtggaaccgccgcctccgccgaagccgatagcctcggactgggttgcagctgcgccgttttcggcacccttttcgcctgccgcccccgtggctgcaggcgcgcatccagcgagccctgctgcgcccgcagcaagagccgccgtcgctccaagtccgagaaacgagcgtctcgacagcgtgttcttctctggcatgaatcctcctttgtcggtgatccgaaggcgcgtcgagcgccttctgcgactcccttaggccgcaatgtcaaagtacctctccgattcccgatgcgcagcgtatgaaacctgccgttttgcgaatcgggcaaaaatgagaggtttcctgctatgcgtttgacagggcaaaacgacggccatgtagtatgctgtgtcgatatgtgaggagggagccgcatgaaggtagacgctgtgaagcagcctgaagcggatgggacgccgttttcgtttcgtctgctcggcattggattttggcaggcatggtggatgctcgtgctttgcacgacgatcgtggtaccgcccgacctgtcgtttctcggcgtaaggccaagcgtttggacgctgctgttcacttcggtcggtttcgcgcttgcggcggccgccgcccctcgggtcggatcgtttatagagcgcgcgtcgatgttcaagctggcggctcttctgtgcacggttgggacaggggcctgcgtggcgatgcgaagcttttccggccatgacgcccttgcggtcttgctgctggtgtttctgatggtcgcggcgttcggcaacgcgcttcttctggttatgtggggcgagctgtgggcgacgctggcgaccgatcgggtgagccaatacctgttctcctcgtacgcgttcgcgttcgtgctgtttttcggagtccagcttttgccctggatagtaacggcggttctcgtatgcctgctgccccttgcctcgtgcgccatcctgtacgcttcgcgcgatgagacgcgcagggctccgtctgcggcggacttcgcggttgaccggccccttgtcgtcaaggctatgggtgcggttgtggttgcggggctggcgtacggcatcgcccagtcgttttacgcgaacatggcgtctttgcacgttgccgagggccgccctgatttgcttgttgcgggagcgtgcttcatagcccttgccgcccacatcgccttcgagcgctcggcggcggctccgatcgcaatgtatcggccgatcgtacccgcgctctcggtcggattgatcctgttcgccatccttcccctcgcatacggatactttggcaacggactcatcatcgtgggcggatactgcctcgacatcctcatcatgctcgtttcggcggatttggcgtttcgggcgaggcggtcggtggcgttgttcttctcgtgctccatcctcgtgttgcgactggcgacgatcgcggggcttgcggtcgtagacattgcggtggggcggggcgtcgtttccgtcgagagccagctgtatctgctggcggcccttgccattttggtgattttggtcggaacgctggttttttcccagggagaactgcagaggttctaccagccccagccggcgattcgggagaaccgcgatctggatgatcactgcagggcgctttccgaacgctgcggtctgacggcccgggaagcggaggttcttgtcctgctggcgagcggtcgcaacgttcctttcatatgcaaggaactctgcattgcggaaagcacggctcgccatcatgtgggcagcatataccgcaaactcggcgtctacgatcggcagggcatgatcgacgtgatcctgcagagctgaaatgttcttccgtctgcattgcgacgaggggtttcgatcgttctcaggtaattatgatgggaaacatcataattacccatgttaatgaggcgagggatcaagcaccatctactcagtcgtaattatcagttgatgcgcgtgcgttcggcagcgggtttgactctatgtccgcatcaccttgaatgggaatgtggggtgcgagcgtacagatgcatcgcaagccaagggctcggagcccatttgcacttgccgtggccgctttcgtgctggtatgcgctgttgccgggggattctgcttccggtaggctctgcgcgaagggcttgcggggacggtgcggggcaatttggccaaagccgacgcggtgtactctatcgccgttatggaaaacagcgtgccgggcgagtacgtgatcgagagtgtttcgctcgatgcaaccgttaccgaaatgctggccgaggcgatcgaatcgtcggggaccgtatcaccgccgagcgatgggcggttcgcgctcgcaggatagccttcgtttgcttcggcgctgccttcctgccgtttccaggcgccgtgcacaacctggtgttagcggttcatctgcgacgatggcaatctttcgagatttttacctgcgcttgacgggcttctgatcgccgcggcgtacagtggttttcgaacagaacggcgaacgacatgaaggcaaggagaatccatgcaggtatcgggagtgatcttcgactgcgacggaacgttgctcgacacgatgggtgcgtggcgcggcgccgagcgcgaactagcaagccgtgctggggcgaagcttacgggagacgacgttgctttgctcaacacgctgaccgtcggcgaagcgggcgagttcttccatcggcgtttttccatcggtgcgagcgcgagcgaggcggccgatgcgctgcagggcctcgttgtcggccattacgccttggccgtgcaggcgcgcagcggcgcgctcgagttcgtccgcgcgctccactcgcttggcgtgaagatgggcgtggcatcctcgagtccgaagcatctgcttgaaatagggctcgggcatgcggggatgagggagtgcttttcgatagttgcctccaccgacgatgtgggagcatcgaagcgccggcccgatgtctacgattacgcccgtgcgtttctcggcacgccgaaggggggcacgtgggtgttcgaggatgcccgttacgcgctcgaaacgcttttgagggcggggtatcgcacgatcggcgttcacgatcgcgacgattcgggcacgttcgacgagctgagcgcccttgccgacaaggccgtatggggctttgaggatatcgatctggtcgagttcgttgcggggcggtatgcgaaagaccgcgttggccaagaaacccttgcgggcatctgctgaggcctcggcgcccgccgcgggtgccgtcggcgctttcggcgacatccatatatggagagcattcgcagcgaaatgggcaattgccgccagtatgctacaataattcgctggaaatgcatcagagagttagggtaaacatatgtcagggcattcaaaatgggcaaccacgaagcatcgtaaggccgcgcaggacgcaaagcgttcggctttgttctccaaactgtcccgtaacatcacggtggcagccaaggagggtggcgacccgaaccctgacaacaacgcgtcgcttgcggccgctatcgaaaaggccaaaggctattcgcttcctaaagataagatcaagaccgcgatcgacaaggcgttcggcagcggaaaggacgccgcgaactacgagacggtcatctacgagggctacggtccggcgggcgtagcggtttatctcgaagcgctcaccgacaaccgcaaccgcaccgccgctgacgtgcgcagcgcgttttcccatgccaacggaagccttggcacatccggatcggttgcgttccagttcgagcgcaaaggccagatcatgattccgaaagaggtcgaaaccggagacaagaaggcgcccgtgaagccgaacggcgcagctgccgacgaggaagagttcatgctcgccgttgccgaggccggcggcgacgattacgaagacgccgacgaggaatggatcgtctacacgagccccaccgatctcatggccgtcaaaaaggccatcgaggaagcgggaatcgagacgaagggcgccgagctcatcatggaagctgccacgccgaccgaggtgagcgtctccgatgccaagaaggtcatgcggctcatcgacaagttcgaagagctcgaggatatccaaaacgtgtaccacacgatggatatcaccgacgagatcgccgaagccctcgacgagtaggacgatactgcaatagagagccgatgcgggcgcgccgacaggtgcgcccgttgctttttcgggcgtttgatgcagtttctatcgggtgggggatgtgttgctcgggctgctctcgtctgattcgagcaacgccataagctctgaatgggagtggatgccgagcttggcgtagatgttgcgcgagtgcgatcgcacggtgttgagcgatacctgaagatggtcggcgacgtatctgcgaccatggccgcgggcaagcagcacgaggacttcctgctcccgttctgtcaggccgtagcgctgcgataccgattgggaacgcaggatcaagcggtcctccgcatcggccggctctgattttcttttcgcaaggtcgatcgcatcttcatacgaaaccggcagcatgagtttatcgagctgcttcgggggcgagacgagcagggcgagcaggataagggcgtacgctccgacgagaaacggcgtggaggacaggttttcttcggcgagcagggggccgacatcgcctccgataaggtatccgagcaagcttccgagcagtacggcggagtatccgaagccgaatatccgcagcggggaggacttcgattgaaagcagatgtaggcgaaaatgcagaacgcgatgtttcccgtgatgccgctgagggtgccgttgagcgcgtaaaacagcggaacgtgatcttcgaacagcgggagcactaccaggatgatcgtggtgccgacgaacaggaaatagcatacgcgcccgtagtcgacctttttgctggcgttgaacgcgtagcagacgaagatgagggcgacgagcattttcagcaggatattgccgacgacgccaagttcgatcgcttctgaggtttgaagcgtcgcgagcatcgttttgatgtagttcgagcagaagcgaaacgcgaagatcatgaatacgagccgtgcgaaggttctgccgaacgatttggcggttttggggcgggcgacggggttcttcttcgtgggaaccagtgcgaacgtgatcgctccgaacgccggcaggaggcagaagagcacggttgatatcggggtgggtgcaacggtgacgatgaggtacaggcatgccgccacgagttgggaagtcatgaacaggagcatcgccctccagggggaaagcgcgctgtacaggatgcccgctttgatgaagaggacggcggcgccgactcctgcgagcagagagccggcatgcagcagcatcgaacccgactcggggacaagccaggataccgccaggcagacatctcctgcaaccgccagcgcggcgattgcagggatcgaccatctcttttcgaaaagccgcgaaaggctgctgctgaggatgccgcaggcgatgagcgcggctatgagcaccaccctcgtttcgacgtaggctgcagaaaacgtcgattcggttcccgatgaaggcgatatccagtcctggacgccgcttgtcgaaaggatccacgccgaccagaacgcgatgccgagataacccaggaacggcgcctggtcgttcaccgattcgaagtacgatgcaatgcgttgtttgatggaatcgatcaaggcaccccttattccagtcagctcaccccgttcagcaattgtagggaaagaaccgcgtgcgcacaaggatggttcagtaagaacttcgcggtgcggccattgtcgtctcaccccgaaaagactagtcctcttttaagcatttcagctgcgaaaacaaatcgcattggtccttttttgacgtttctgccatgaggcgggcgggctatcgtgcaggtcgtcgatacgacagagggaacaagatataaggaggaaccgatggaaaaggtaactacgaggcgcagctttgtggcggcaacgggtttgggcatgctcggtttggcgggcggagctctcggccttgcaggttgcagctccgagcctgcgcagaaaagctcgggcgctcaggcgtcggaggtcgcgtgggatgaggaatacgacgtaatcgtcgtcggtgcgggccttgccggcctggctgccgccataacggtggcgaccgagggcgacggggcgacgtgccttctcctcgaaaagagcgatcagcccgcaggcggcggcaacagccagttctcgtcgggcagcgtaacctataccgatgacgccgaagcattcgggagctatctcaaagagctgcggggcgattatacgggtacgcccgacgacatcctcgaagtgttcgcacagcgcagcgccgaactgcgcgactgggttgtcggccttggcgccgacgagtcggatatgaagttcacgaacgaagacgggtcgaagaaaggcgagttcggcgaactcgagaactcggaatcgtatcgctacatgagcttcgacaagaaggaatccaagagcttcacccacatatcgcactttgccctgtcggtcgtcgaggcccatgccgacgtcatcaccgaaaagacgaaggctccgctgaccgatcttgtctgcgacgccgagggcgcggttgtcggcgttgtgtacgacgaccgcggcaaagagatgaaagcgaaggcgaacaagggcgtcatcatgtgctgcggcggcttcgaaaacgataccgtcatgcgccaggactacttgtcggcaccgcacgcccaccccgttgcgggcatcaacaacaccggtgacggccatcgcatctgcgcgaagatcggtgccgacatgtggcatatgcactcgtgcgccggcttctggacgaacgccgtttcgctcgacggcgagaaatactgcgcataccgtaagatcaacaagcaaaacggcatcaccgtcggcataaacggccgccgattcttcatggactacgatatggcggtttcgggctggcctcagtctgacgagctcgtgagcctcgaaggggatgtcggctgccgtcacggacatcagcagttcggcggagatggcctttgctgccgcttccttcggtcatgtggttcgtctacgatcaggatcatgcggaggacgcctacaccgacggttcgggcgatccggtagctgacgggttcgccgtgtcggccgactcgatcgaagaactggcggcgctcatcgacgtgcccgaatccgaactgagggaaacggtcgatttgtggaactcctactgcgaaggcggaaaagacctttcgttccaccgcccgccctccacgttgaaccctgttgccaacgggccgttctatgcgatgaagtgctgttgcgagttgctgaacaccgatgggggcccgcgccgcaacgcgaaggcccagatcctcgacaccgcaggcgagccgattcccaacctgtattcggcgggagaattcggatcgctgtgggcccatctctaccagggttcgtgcaacctctccgagtgcttggtgttcggccgcgttgccgtgcaaagcgccctcggcatagcgtagggttgccgaactgcgctgttcttgccgcccgcgaaacctgcttcccaaggttttcgcgggcggtttcttttgcggcgtcgcgcagagcgcacagggtttgccgtcgccgtgctccgatcgtggggattgcgttcgagggctttgcgttgccgccgtttgtggtatcattcgaacaagtgtttgttgatttgccaggtgattttcggacggcgggccattctgcccgcacggccggcggctggctggtatcggaaagggccgcatgtcttcggtgcgtcgcgttgttctcggaatcgatccggggttggccaatacgggctgggggattgtctcccagcagggcatgcgcctgtcgtgccttgcctacgggtgcgtttcgacgtcgaaggatatggaactggcgcagcgcttgaagaagatccacgatcagatgagcgccgtgatcgcgcgattcgaacccgaatgcgtgggcatcgaaacggtttggttcggcgagaacgtaacggcgggtatcggcacgagccaggcgcgcggagcggcgcttgtcgcctgcgccgcaggcagccttcccgtcggcgagttcactcctcgccagatcaagctcgccgtcgtcggcacgggctccgccgaaaaagagcaggtgcagtacatggtgaagcagctgctttcgctcgacgccgttccccatcccgatcacgcagccgatgcgctggcggccgcaatatgctatacgacgcacgaaggagtgctatgatcgcgtttctcaacggaatccttgccgggaaaacacaggatacggcgtatatcgaggtagccggcgtcgggtatgcggtcggcatggccgcaggcagccttgcgaagcttcccgaaacgggggagcgggtgcaggtgcacacccatctgtacgtgcgcgaggacgcgctttcgctgttcgggttcctcacggtggaagagaagagcttgtttctgcgcttgaacagcgtgtcgggcatcggacccaaggttgcgctttcggcgctttcggtattttcgccccagcagctcgtgacggccatcacctctcaggatgtcgcgctggtttcgaagattccgggggtggggaagaaaaccgcctcgcggatcatcctcgaactcaaaggttcgctcgacgccgacctgctcggcgaggcagcgggctctgcggctgccgctggaagcgcgatgcagggcgttcaggatgcgcttctctccatggggttcaccactgcggagatcgaaattgcgctcaagggcgctcctgcggcagcggatgagggcgtcctgttacaatacgcactgaagcggttgggcgaataggcccgatcgcgcgtcgatacggatggcattcaagaacgggcggaaatggctaacgaaggaatagaaatagagggattggttttttcggcatcggaagccgatgcggccatgagcgcatcgcgcgcggtcactcccgacctcgtcgaagacgatctcgccctcgatcgcagcctccgtcccaagcttttggccgactatgcggggcaggagaaggtgaaagattccctttccgtgctcatcgaggccgctaaggcgcgtggcgaatcggtcgatcacatcctgttctcgggtcctccgggacttggcaaaaccacgcttgccaccgttgtcgcaaacgagctccatgccagcatcagaacgacgagcggtccggccatcgagcgcacgggcgatctggcggcgatcctcaccaacctcgaagagggagatgttctgttcatcgacgagatccatcgtctgaatcgcatggtcgaagaagtgctgtatcccgccctcgaggatttcgtgctcgacatcgtggtggggaagggtcctgcggcccgatcgatccgtcttgatctgccgcgtttcacccttatcggcgccacgacgcgaaccgggcttttgaccgggcctttgcgggaccggttcggcatgctgttccgccttgattactacactcccgacgaactcgccaccatcgtgtgccgatccgcttcgattctcgatatcggcatcgagcaggatggcgcgcttgagatcgcccgtcgcagcagggggacgccgcgtctggccaaccgcctgctcaagcgcgtgcgcgactgggcgcaagtgcgcggcgacggcaccatcgacgaggacgtggcggcgcaggcgttgagctttttcgaggttgattcccttggtctcgacataatggataaccgcattctcgagcttttggccgtccagttcgccggtcggccggtggggctcaccacgcttgcgtcggcgctttcggaagaccccgaaacgctcgaagatgtctacgagccgtaccttttgcagcaagggctcatgatccgcacgccccgagggcggcaggcaaccgaaagaacgtacgaccatctgggcatcgccgtgccgccgacgaactgatcgccggccggcgatcccgtgcaaccgcgaccgaaagagagaccatgtttcagcaagattaccttatgcgcatcttccttcaatttgccgaagccatcaggcgcagcatgcttaaagcgaacggcgagcaggatcctgcttctgctgctgggatgctcgaggcggccgtcggcgaggcgaccgagcttgacggcgatgtgttcttgtcgcttgcccccgaatcgatgacgagcattctctccgtttccggaaccgatccgcgcgtagtcgagtacattgcgcgcagcctgctgctggaatccgaatacttgaaggatgccggacagccggaaaaggcggagcttcgtgcagaacaggctgccgcgctcgcgcaatcgtgcggcatcgagctcgacgaggatgcgatcacgcccgaggagctcgatgcgtttttcgaggaaagccaaaggggcttgaagtaggagcatgggccggtttcgcaaaggagccgaatcctgcggggcgtttttggcaggttggcatccgatcgatggacgaaagcgcaagacgatggccctgaaaaaccgtctttgcgtcaacgaacgcccgtccaaagccttacgggacggtaaaaaaacgcgaatcccgataaatgaggggtgcaaccgcacgactttagtgtaaagtggaacaaagccccagcaatgggggccaagtgttgccgccatgcagcacgaagagtgaccttccccgggtaggggaagaggaaagaggaaacaatggcggaaggtactgttaagtggttcaacccggaaaaaggctatgggttcatctcccagaacgatggcgaagatctcttcgttcatttctctgagatcaagatggacgggttcaagaccctcgacgaaggtgctgcagtgcagttcgacgtcaccaccggtcagaatggcaagctccaggcgagcaatgtgacgaaggcttaactttcgggtttgtcttacatatgccagaagcggccccgcgaaagcggggtcgcttttttgtgcaagaacttgagtctgccgggcgtgatgcgcgcgaagcgcgccgtatgcaacgctgcgtgcgaaacgtgcgagatgcggtatctgcgatgcgatgcgcggcagcctacacgatgaacatcgcatcgccgaacgagagcatgcggtattcatcggcgatcgcatgctcgtaggccgtcatgatgttctcgcgcgtagagaacgcgctcacgagcatcatgagcgtcgagcgcggtacgtggaagttcgttacgagcgcgtcgactacgtggaactcgtagccgggaagaatatagagcgacgttgcctcgcggtcccgcgccttgagctcgcctgcttgcgcatcccaggcgctttcgaggctgcgaacgctcgtggtgccgaccgcgacgacgcgtccgccgcattctttcgtgcgcgcgatcgcgtcgacgacgcgctggggaacggtgtagtactcggtgtggatgcgatgcttctcggggtcttcttcatcgacgatgcggaacgtgtcgagccctacttcgagttctacggtttcccaatcgacgcccttctccttgagccgggcgatcagctcgggagtgaagtgaagtcccgccgtgggcgcggctgccgacttctcgcgagttgagaacacggtctggtagagctcctcgtcgcctgcgtagtttttgatgtaggggggcagcggcgtgtggccgaccgcgtgcatcgcttcgtcgagcgtgctgtacgattcggtggcgagtcgggcgaggcgctcgcccttctcggcgttttcgacccagtcgacgatttccgccgtcagcgccacattgcctgcggcgtcgcggaacccgacggcggcgcctggtttcaggcgcttgcccgggcgcacgagcacctcccagaatgcggtggtgttcgaagcttcgccgtgcccgaacgactcgcgcagaagaaacacctcggcggctccgccggttccccgcttcgcgccgagcagccgagccggcatgacgcgcgtttcgtttgcgacgagcagatcgcccggctcgaggtagtcgtagatgtcgcggaagatgcgatcttcgagcgctcctgttgcgcggtccatgacgagcatcctgcatgcgtcgcgttctgcggcgggttcttgcgcgatgcgctcttcgggaaggtcgtagtcgaaatcgctggttctcatctgcaatctttcttcggtggctaagcttaccggcatcgggtgattcgggttcgctctcgcgcgcggttcgggcgtcggatctccctttggccgtccgccttcgagtacgttggatgccgggttgccattataggcgtttcgctcgcgattgcccggctcaatcgtcccgctttttgcggagctccttgagtatgcgccgtttgcgctcctgttgttcggcataggcttgccgcgcccgctttttctcggcgcgttcggcttcggtcgcggcgcgctcttcggcgtgcgcttcccgcttcgcttcgcgttcggcggcccgcgccgctttcctctcgcggcgctccgcttccgcttccgcctgcgagatgcggcatccgcagtaattttggcgatacatgccgagcgcacggcttcggcgcgtggcttcgtcgtagaaaggacggaaatcctcgaacaccgaatcgacgccgtatgcgcggctcgctcgaacaagctcttcttggatgacctcggtatactggtaggggcttacggtgagtgtggtggaaatgccatcgaagccatgccccgcggcgcagcgggcggcttcctcgagccgcaggcgatagcaggcgcggcatcgatcccgcctatcggcttgcgggtcggccgcaacggcgcccgcccgatcctcccattcgcgtgcgtcgtatgcgccctcgatgaccggaataccggcctcttcggcccatgcgcgcaaggtcgcaagcctacgagcgtactcgcttacgggatggatgttcgaattcatgtaggcgatggttatgtcgtggcctgcctgcgccaagagcctcgcgggttcaagcgaacaggggccgcagcatgcatggagtagtaatttcatatgcttatcgctcgctccttttctcctgccttatactaccatgcgaacgtatacgcaacctgatacataaggattaccacatggagcaaacaccctatcgcgcagtgttcttcgatttggacggtacgctgctgccgatggatctcagcgagttcatgcagtcgtacttcgagagcctcgccgcctacgttgccgcgcgggggatagatcccgccgtgttcacggcgggcctcaagagcggcatcaaggcgatggcggcgcacgatgacggacgtctcaacgcagaggcgtactgggatgcctttttcgaggtcgtcgatcgcggcgagatcgattggacgccgttcatcaacgaattctacgagaacgatttcgggaagatcgggaagggcgtcgtgccgaatccggctgcagcgcgcgtgatcgagacgcttgccgcaaagggctatcctctcgtgctggccaccatgcccatgtttcccttgcgcgccgtgcaatggcgccttgcctgggcgggggtcgacccgaatgcgtttgcgcgcatcaccaactacgagaactcgacgtcggtcaagcccaagctcgcctactatgccgagaaccttcgtgcggccgggctcgaaggcgcagatgtgcttatggtcggcaacaataccaaagaagacctcgcttgtctcggcgtcggcatggacgcctatcttgtgaccgaccatctgcttgatcctgagaagttcgatctgtcgcaggtgaagcacggtacgatggaggaattcgccgcatgggtggacgctcttccggcgtgcgagaatccggcaaccggcatcgtcgccggtcccgtggacgacgaattgtaggctcaggatggcattgttcgattttaccgtagaagccgcgagcggctacgcccgcgcggcgtcgttcgaaaccgcccacggagttgcaaaaacccctatgttcatgccggtgggcacgcatgcgaccgtgaagggcgtcacgaccgaccagctttccgacctcggtgcgcaggtggtgctcgccaacacctaccatctgtccatgcgccctggcgccgatctcatcgccgaggcgggcgggttgcatgagttcatgcagtggcatgggccgattctcaccgattcgggcgggttccagatattctcgcttgccgatacgcgcaagctcgacgccgacggcgtgacgtttcgatccatctacgacggttcgaagatccgctggactcccgaaagcaacatggagatacagcagaagctcggcgccgatatcgtcatgcagctcgatcaatgcgccccgtatcccgcaacgcgcgagttcgtggaaagcgccgtcgatctttcggcccgctgggcggcgcgatgcctggcggcgcacaccagggaggatcaggcgctgttcggcatcgtgcagggcgggatgcatctcgacctgcgcctgcagtcggtcgagcgcctcaaggaggcgggccgtgcgagcatcgaatccgggcataaggatttccagggtttcggcatcggcggctattcggtcggcgaggaacacgacgtgatgttcgagacgctcggcgaagttgctcgcgcccttcccgatgacaagccgcgctatctcatgggcgtcggcaaccccaccacgctcgtgcgcgccgtgcgcgaaggcgtcgacatgttcgattgcgtgcttcccacccgaaccgcccgcatgggcacggcgttttcgtcgaccggtcgcatgaacatgcgcaacgcgaagtacacgcgcgatttcgggccgctcgacgatgcgtgcacctgcccggtgtgcgcaaagtacactcgtgcctacatccgtcacctcgtcaaatcgaacgagatgctcggcggcatgctgctttcggtgcacaatctgcactacctgctcgatctcatgcgccgcgctcgaagcgccgtgctggcgggcgagtacgaagagttctaccaagcgtggatggcatcgccggcggcgaacgactattgatcgggtaaaggttcggcatcgactccgccggtctatctggttatgggagtggacttgtggcacaatatgaaggctcgtgcacccgaacgccgttgaatacggccatgcgggtgcgctcatcgcaatgaaacgactccgtgtagacgtacgaggaagaagaatcagcatggcggtacagacgaagaaaaagaaaaaaggctctgccgacaggcgaaacatatggctccttgtggtcacgacgcttctggtggtgggatcgatatttttgttcacgccccccgcagagaagatcaaccagggtctcgacatccagggcggcctttcggtcgtgttgactgcgaagagcaccgacgggggagagataaccaccgaggacatggaggccagccgttccattatcgagagccgcgtcaatgcgctcggtgcctctgaagcgaccgtgcaggcgcagggcaccgatcagattctcgtgcagatcccggggctctccgatacggaagccgcgctcaacaccatcggcaagaccggcaagctcgagttcgcgcgactcgattcgtttaccgacgaagcggtgaaaaccaagatcgagaacaatcagttctctaccgaggagacctataccgacgaggcgggcaattcgctcccgtcgggtaagacgacccatctcgaggtcgaacccggtacctatacgccgatcgccaccggctccaacattgaaagcgtatcgatcgggcaggagtccacgacatcgaccgactactcggtcaacgtgaagctcgatagcgatggcgcggccgcattcgccgaggcgaccaaggagctcgtgtccgaccatggcaagatcgtcatcatcttggatggcgaagtgcaaaacgcgcctgccgtgtcgtcggagatccccaacggcgaggtgtccatcacgggcggctacacgctcgacggtgccaaatcgctgcagaccgtgctccagagcggctctctgcccgtgagtttcgagtacgcgcagagccaggtcgtcggacctacgctcggtcaagaggcgctcttcgcgggtgtggttgccgcggcgatcgggttgctcgtcgtcatgctgtacctgttgttcttctaccgcggactcggcctcatcacggctgctgccatggccatattcgcggtcatctacctaggcatactggccgcgctttccgctttcggcttgttcagcctttcccttgcgggaatcgcgggcatcgtgctcaccatcggcatggcggccgattcctcgatcctcacgctcgaacggttccgcgaggagattcgcatgggccgaagcgtgcgcgcctcgtcgatcaccggtgttcgccacgcgatcgtcacctcggtcgacgccgacctcgtcacgctcgtgtccgcgctctcgctgttcttcctcgcttcggcgtcggtcaagggcttcggtcttacgctcgcgctcggcatcttttgcgacatcgtgatgatgctgctgttcaaagcgccgctcatccgcctgctcgccccgcgttcgatcgccaagcatccgggattctggggcatcaaggatagccttgcggctgctgacgattacaaagcgctcgctgcggccgaaggcgaatccgttgccgccgcagaggaaggcgcggcactcgatgcgaaggcaagcgaagaggttgccgagaagctcgatggtgcagagggcgcccgtgccgctgaaaccgcgtcgaaatcgcgcgggaagttcatcaagcacgacatcaacttcctcggtcatcgcaaggtgttcttgacggtggccgctgtgctcgtgatcgcatcgttcgcgatcgtgggggtgaaaggcctgaatttcggcatcgagttcgtgggaggcacgtcgatcgcgttccatgggacgggcgatgtaacgaccgagcagatgcgcacagccttcgacgatgcgggcgagcccgacgccgtcgtccagacgacgaccgccgagggtgaagccggattcctcgtgcgcaccacgacgacaagcgccgaagacgccgcagcaacggcgaacaaagttgcagacgggctcggccttgcggccgatagcttcgaagtcacgacgatcggtcccgactggggggcaagcgtcatccagtcgtcgatcatcgcgtttctcgtgtcgatcatcctcatcatcatctacatcgcaatcaggttcgagtacaagatgggcgtcacggccatcatcgcgcttctgcacgacctcgtgcttgtgatgggcatttacgcgcttgtgggccgcgaggtcaacccgaacaccattgcggcgctgctcacgatcctcgggtattcgctctacgactcggtggtcgtgttccaccgcatcaacgacaacatgaaggaaaccgacatcaagtgcacgttcatgacgatggcgaaccattcgatcaaccaggtgctcgtgcgcaccatcaacacgacgctgacctcgctgattcccgtcgtcgcaatgcttttgttcggcggcgagacgcttagggacttcgcgttcgccatgaccatcggccttgtgtgcggttcgtactcgtcgatcgccgtggccacgccgctttatgccatgtggaagacgcgcgagcctcgctacgcgaagctggcgaagaagtacggccccgagatcgggcgcttcgagttcgcccatccgagcgtgagcgctccggtcatggcgaccaagaagccgtccaatgtcaaggcgggcaaaacggccgagaaggccgcttccgccaagaaggcatcgggctcggcaggttcggccggtgccaagagcaaccatcattaccggaagaagaagcgataacggcaatggatcaacgattggcgggcctgcatgcgcgggcccgcttgagcgacggcggaaggagccgatcatgagagagggtagcgccccgaatttctgcccgcctaccgaagagggcatcacgcttacgttcgaagacgagggaggagagcgcatcgacctcgaattcctcggtttgattctgcatgaggggaaaagctacggcttcttcttcccgatcgacgaggacgtgcctgcgggctcgtcgggcgaggtcgtgctgctcgaagtgaccgagcttgatgaagacggccagccggcggctttcgagctcgttgaagacgaggccatcgccgcggaggtgtacgatgatttccgcacggcgactgcggagctgtacgatttcgaggactaggcgctgcgaagtttcatcggagtgcgcaaggcggggcttcaaagccccgccttcgcgcttccggaatctcagaactcgatcggaacccagcttccgtcgatgtcgcacatccaggcctggggttcttcgactgagaagaacgtgagcacggggtcgttttcgccttcgtaggtttcgccgagaccgcacatgtgctcgtatcccgctttccgaacctccgcgtttgcgcgatcctcgagccctgcctttccgcgcaggatgatccatccgtgtcccggatgccagcccgacagctcgaacttcgggtttgcctgaagctcgcgatagacgtctttggtggtggccgtgcagaaccatatctttccgtcctgttcggcggcgaagctgaacgggcgcacgtggggctgatctccctcgcaggtggcgaggtaccatgcggggatgttggtgaggtaatcgaggacctgttcgtttccggtcatgctctgttcctttctctgcttcgagcgtcgaggctcgtttctgggcggtaagcccgttttcatcggattgcgaatgttcgctgaaagcgctcgtcttagagggggatgaaattcgtggcgaagacgacggcaaacatgattgcgagtacgataacggcattgcggtcgagcgcggtgtaatgcagcggcttgaggcgcgtgcgccccgggcctccgtggtagcagcgcgcatccatggcgagcgacagtgtttcggcgtgtctgaaggcacttgtgaacaacgggaccatgagcgatgtcagcatgcgcaggccgcccttgaacgggcttgaggcgaatgcggccccgcgactgatctgcgcgcggtagatcgtctgcagttcggtggtgaactggggaaggaacctgagcgcgatacccatgatcatcgagagctcgtgtgcgggcacgccgacgcgcgcgaagggcttcaagaggtactcgaacgcatcggttatgtcgagcgtcgcggtggcgagcgtgagcaggctcatgctgagcagcagcaaaaacaggcgcacggcgatgaaggcggcctgcacgaggcccgcctcgctgatctggatgatccaccactggaagtacacggtgccgccctgcacgaagaacacgttcagaagcgcggtgatgacgaggatgaacgcgagcggggcgatcgatcttacggctttgccgagcgggatcttggcgatgatgaagaacgccgctgtgaacgccgcgcacacggcgaggccgacgaaggactgggcgacgaagatgatcgccatcaccgcaagcgagagcaggagcttcgctctcggatccatccggtggatggggctcgttcccggccaatattttccgaacatggctatttcgggcacgacgcctcattcccttcgatacccgatgcgaaaggagcgtctgcggttcgcggctcttcttgcgcgttcggcacatcgagcgcatcgggcgacgcagaggagcgcttgcggtacagcgttgcaagcgcgtctgccagagattgggtatcgtagagctcgccgttcaggtgaatgcccgcttctctgaggtcgttcgccagcttttgggccgagggcacgcccaggccgatatcgcgcagctctgaggcatgcgagaacacttccgcaggtgttccgagggtgaaaagcgacccctctttaagcacgaggacccgatcgcagtagcgtgcgaggtcgtccatcgtatgggagaccatgacaacagtaagaccgctttcgtgcaggtcagaaatcaggttgaggaaatcgttgcgcgcggcggggtcgagtccggccaccggttcgtcgaggatgagcttggtcgggcgcatggcgagcacccctgcgaacgccacgcggcgctgctggccgcccgaaagctcgaagggactcttgtcgcggatctcgtcgaagtcgagggcgacctgcgcaagcgattcccggacgcgcgcatcgacctcgcttgcggcaaggcccatgttacgcgggccgaacgccacgtcgtcgtagacggtggccgcgaacagctggtgctcggggtactggaacacgacgcctacgttgctgcgcgccgctgcagcggccttcttgtcggcgatgtcgacgccgtcgacgagcacgcgccccgaggtggggtggatgagcccgttcatgtgctggatgagagtgcttttgccgcttcccgtatgcccggcaatgccgaggaattccccgtcttcaagggtgaaggtgatgttgcaaagcgcccatgtcttgccggcggggtttccccagagcggcttcggcgcgtcggcgccatcgcttttcgccgtgtcgatggcgcaaggcgatgcgctgtctgccccgacggacgcggcccccggttcgaccgacgcgtcgaagccgcctgaatccgcatcgcccttgcgccggcgcttctttttcgcgggtgcgctgtacgagtagcttacctgttcgaaagcaattggcatagctcctcctcaaggctctggtcgtcgacgtgcgttgctacgggcacgcctcttttctgcagctcgcgcgagagttcgcaggcgaacggcacgtcaaggttcaggcggacgagcttctcggtctgggtgagcacctcgtcgggcgtgccgtcgagtgcgatctttccgccgtcgagcacgaccacgcgatcggcaagtcctgcttcttccatgaagtgggtgatcatgacgatggtcataccgcgatcgttcagctcgctgcatacgcgcatgagcccgcgcctgccgcgcgggtcgagcatggccgacgcctcgtcgagcaccagtatctgcgggttcatggccagcacgcccgcgatggcgacgcgctgcttctgcccgccggaaagcgcgttggtttcgtgcttctcgaacccctgcaaccccacttcgtcgagtgacgaggtcacgcgggtcctcagctcgtcggtggggacgccgaggttttcggggccgaaggcgacgtcgttttctatcaggctcgcgacgagctgatcgtcggggttctgaaacaccatgcccgcattgctgcggatcaggtatagagcgctctcgtcgcgcgtgtcgtgtccgagcacgctaaccgctccttcgtcgggtacgagcagcgcgttgatgtgcttggcaagcgttgacttgcctgagccgttgcctccgaggatgcagacgaactgtcctgagggtatcgagagctcgatgccttgcaagacgaacgtctcaccgtcgtaggtgaagccggtctgttcgaattcgatcatgcgtttcgttttccttccatgggctcgcttttctgctgcgaacccgcttcccgctttcgggctgagcttcgtacgggtggcaagagaagcgggcttcgcctgctcgatgctgccgcgcgcctgcggccgtattcggctacttgcccttgatctgctttttcttaggtgtgatgaggttcgatatgctcttgtacacgatgagcgtcaacacagaattgatcagcgccttgataaggttgaacggtgtcagtatcgggatgatcatggcgacaacggcatcgagcggcacgccgagccatgcgggggtgatgatgaggtttccgaggatcgcggcaagcgttgcgcagatcgaggagatgacgagtccggcgatggctcccttgtaattgtgcactttcttgtagatgagggcggcgggcagaatgtatccggtgacgacgatgatgttcataaccgcgcctgagaaatctccgagcatgatgccgtggatgacggcgccgatgatgccgaccgagagtcctgccgcgggtccgtatgcgaagccgcagaccatggcgggcatggccgaggcgtcgtacttgagccaggtgacgccgggaaggagggggaactcgatgaacgagaggagcaccccgatcgcgcagaggagcgccattgtcacgagttggcgcgtttcccatttgttcgtgttcttgaattggtagttgttcgcggcttcagccatagcgtaccctttctcttgcgagccccgtgtagagcaggtgtcgattccgggcccagaaaagaaacgaacctgtatgaattcctctttcatacaggcttctcgggtttgcagaactccgccttacggcgaaacgtccctgcaagctctgcctcttccatccggactgtaaccgttggttttggaatctcaccaaaatcagcctgcgtacccgatgccgccgcgttgcggttgatcgatgccgcagggtcgcggactctcggttcggccgcttgcgcggaccgaccgaattaccgccagtgaggaattgcacctcgccctgaaacagaattcaatgcccgtattgtatcgggagtgcgcgcaatgcgcaagggggaggtgggccgccgtcgatgcgggatgcgcccgatcgtccgatcggagtatgcgctcccgggtttttggggaattctgcagggaaatgtgtattctttgccccattctatgagctgttgtatgatggcacgaacgtagattaatcgcaccaggagcactccgccatggcatttgacaccgatccgaacaatcagagcgatcagcccatcggtcgccatgctgcgggcaaccatgcccgccagcaaccccaatcgacgcagagcatgccgtcccagtcggcacctcctcgccgcccgcagcagaccggggcgttctcgcctgtggtgagcccggccgaagtcggccgctcgcgcaggggcaaagggggagggcagggcccctacatgaacctcggacccaggaaacgctcgggcgccaaggtcgccgtgatcgccgtgctcgtcatcgtcgtgttcatcggcgctctcgtcggcctcgaattcggccttaacgatggcaaggtccaccatggcatcaaggtgcagggtgtcgaaatcggcggcatggacaaggccgaggcaacgcagacgctccagaccgccctcgattcgaagctcgccggcgcaaccgtgcgcgtcaccccgagcgccgatgtggttaagcgcctcgaagagagcaccgtcgacgatgcgagcggcgaggttcccgccggggaagagggcgccgaagagggttccgtcgacggcgaggcatcgggcggcggatcttcgtcaggcggcgaatcgctcgcgtggtctttctcggctgccgacctcggcgcgagcgtggatgcctccgcgcttgtcgatgaggccatggaggtcggccgcataaccgggttcgacgattttgcgagcggtgcgggcgcgcgtctgagcagctggcttgggcaggttgacctttccgctacggtcaactacgacgaagcggctctcgagacggcgctgcagaccatagacgacgccattggcgtttccatggtgaactgcggcatcgccatcaacgccgacggcgttgcgcaggtgaccgccggacgtgtgggcgagaaggtggacgcagaggcattcgcgcccaaggcgaccgccatgctgctcggtgcgaccacgacgtcgttcgacgttccgatgaccgagattccgctcgacatcgatagcgatgaggcgcaggccgttgccgattcgattacggccgccatagccgatcccgtgacgttcacctacggggacgactcgtggcagatctgggctcccatgctcggcgagtggacgaagatcgagaccgagggcgaaggcgacaacgcgaagctcgtcgcttccatcgatgcggccaaagcttacgacggcctgcagggccagatgggctcggttggctacggcacggcgggcaatgcgacgttcgacgtgtcgagcggcgttcccgttatcacgggcggcaccatgggcatcggccccgatatcaagacgggcgtccacacgctcggggatatgctctacggaaccgccgaggcgggcgatcgaaccatcgtgctcgaagaggccgaggtcgaacccgagatcacggccgaggatgccgagagcatgggcgtcgtggagctgatcacctcctacaaactcggctacggatcgaacgggggcacgaatcgcgagtacaacatcgagctgtgtctcgatacgctcaacgggtcgcttatcgctcctggtcagaattggaattggaacgatatcgtcggcaactgcgacgaggccgctggctacaaggaagccaacgtcatcgtgaacaacaagtacgagaagtcgtcgggaggcggcatctgcaatgtcgctacgggcgtgttcaacgcggcgtacgaggcgggccttcccatcgtcgaacgcacgaaccacagcctgtaccagccgaactatccgctcggtcgcgacgctgccgtgtcgtgggagtatccgacgctcatcttcacgaacgacaccgatcactacattctcgtcaccgccgactacgatggcgtcgatatgacgatcagcatctggggcacgagcccgcaccgtacggtggagagcacgaacagcgattggtcgggcaccgataaagacggcaagtcgatcacgaactaccgcacggtgaaggatgccgacggcaacgtgatctcggaggatacgttcccctcgtacttcccgcccgttccggaagacgacgattaggctgaaagctcgttcgagcggtttcggtttggcagcaggtctgtgaagacctgcggattttatcgtgccaaagcagctgttcgggtacaatcgtgcagttatgatcgaattgctcaacacaatagacagtttcgtatggggtccggccatgatcgcgcttctgctgggcagccatctgttcctcacgttcaagacggggttcatccagcgcaagcttccgaaggcgatcaggctctcgtttagctccgatgcgaatgccgagggcgacatctcccatttcggagcgctcgcgaccgcgcttgccgccactatcggcaccggttcgatcgtcggtgtggcgacggctatccttgcaggcggaccgggcgccgtgttctggatgtggctcaccggcgtgttcggcattgcaaccaaatactccgaggtgttcgcggcaatcaaataccgtgtgaaggatcacaaaggcgagatgctcggcggcgcgatgtacatctgggagcgcgcgttttccaaaaaggaagggaaggccccctggtgggcccgcctcggcgcgatcgccttcgcggctttcgcgtccatcgcggccatcggcacgggttcggcggtgcaggcatcggccatgaccggcatcatcgcgtcgaacgcgccgtggattcccgcctgggcgatcggcatcgcgatcgtcgtgctggtttcggtggtcatcttcgggggagtggagtccatctccaaggtatgcgagaagctcgtcccgttcatggccgttgcctacgcgctcgggtgcatcgtgatcctagcgctcaacgcgccgtttctcggcgcggcgctcgggctcatcttcgaatgcgcgttcacttcgaaggcggcgttcggcggagcggtcgggtcgggcctcatgatggctttgcagttcggctgcgcccgcggcctgttctccaacgaatcgggtctgggctcggctcccatcgtggcttccgccgctgcgacgcgcaatcctgcgcagcaggctctcgtcgccatgaccggcaccttctggtccacggtcgtcatctgcgcgctcacgggcgtcgtgctcgtatcgacgctcgtggcgcatcccgacatccagggcgagattctggcgaatcccacgctgttcaccggtgctcagcttgcaagcacggcgtttgcgaagataccctttgtgggcacgccgatcctcgtgttcggcatggttgcgttctcctacaccacgatcctcggctggtcctactacggcaaccgctgcatcacctacctgttcggaatgaaggccatccggccctatcaggtgctctacgtggccgttgcgttcctcggggccatcggcgtgggcgatgtggtgtggactatctcggatatcggaaacgccctcatggccattcccaacatcatcgtcgtgcttctgctttcgggccttgtggcccgcgagacgcgccactacgtttacgaggggcatctcgacgaggttgacgaaacccccatccccgtcgtagcgggtaaataacccggcgaacgacggtttgccgtcgtccgcattcgtgtcgcccgcctcgcctccgttgcccgcatgcgcgcagtccgccttgctttcgccgcccgtatgacgccgttccccccgtacttaggtgcgaatttccctgttgttaacaaaccaccgtagggcgactggctataatgtgcgtcattactttagcgcggaaaagtgcttataccgaaacggcattcccggcttcgccctgctgcgggcggcaatcggtttcggcgtcggctctcttctcgtttctgtggggaaaacgcaatcggagagaaaggggtctgcatggacatcgttcagcttatcaacgatatcgacgcagcggtatggggtcctcccatgatcatcctgcttctgggatcgcacttgttcctgacgatcaggaccgggttcatccagcgaaagattccgaaggccatcaagctttcggttacgaaggatcccgatgcagagggggatatcagccagttcggcgctttgaccacggcgctttcggctacgatcggaaccggcaacatcgtcggcgttgcaacggccatcctcgcaggtggcccaggagcggtgctttggatgtggctcaccggcgtattcggcatcgcgaccaagtattctgaaacctacgctgcggtgaaataccgcgtgaaggaccataacggcaacatgctcggcggtgcgatgtacgcgtggcgccgcgcattcgagaagaacggaaaaaccccgtggtgggcgctgttgggtgcaggcgcattcgcgctgttcgcatccatcgcatcgttcggcatcggctcggctgtgcagtcgagcgccatgacgggcatcatcacctccaacatgcctgggatcccgacctggggaatcggccttgccatcgtcattatggtgtccatcgtcatcttcggcggcatcaaggtcatctcgaaggtatgcgagaagctcgtgccgttcatggcgatcgcctacgcgtggggttgcatcgtcatcatcgggatgaactgggagtacgtttggccggccatctgcctgatctgcgaatgcgccttcacgcccaaagctgcgttcggcggagcggtcgggtcgggcctcatgatggcgttgcagttcggctgcgcccgcggcctgttctccaacgagtcgggcatgggctcggcacccatcgttgcctctgcggccaccacccgcaaccccgcccggcaggcgctcgtttccatgaccggcaccttctgggatacggtcgtcatctgcgcgctcacgggcatcgtgctcgtatcgaccatgatcgcccaccccgacatcatggcgggtggccagattgccgcgggcgccgatttgacgagtgccgcgtttgcgaggattccctacatcggcacgccgatcctcatcttcggcatgatcctgttcgcctattccacaatcctcggatggtcctactacggtaaccgttgcgtcacctatctgttcggcaagcgtgccatccgcccgtaccaggtgctctatgtggccgttgcgttcctcggcgccatcggcatcggcgatttggtgtggaccatctccgatatcaccaatgcgctcatggccgtgcccaacatcatcgtggtgctggctctttctggtcttatcgcgcgcgaaacaaagcattacgtttgggataagaacctcgacgagaaggatgaaacccccattccggttctcgagaacaaatagcttgcgcgcaagcgcttcgacggaaaacggctgcaggagagaaatcctgcagccgttttttttcgtagcggttcccgatttctcgaaacctggcacaaaattggacctgtggcaaagtgtaatagaataccgtgtgggaaaaccgcatcggtgatttttaccatcaggcattatgtaaacatttcaggggaatttattaatgtaatatatttctaaattgccccaggtccaattttgtgccaggattccaggttttggggcatggcggggttctgctgcgcaagcgctcccgcacgaggggcccttgcggtcgattcccgtcgcatgagggcgctgcggtacgttgcgggcattcgaggtttcgaatgcatcgggagggcgggcgactaccttatttcccgaatgttgctggcgtttttcctgttcaacgcctctctacccaaggcggtatgagtatcctcactcaaatataaatagtggtattaccctgtctcgtatgagcccgtttccaaaagttcatagcgggcatggtaaggccgtctttccgacgatcgtatgctccggctgtccatgaaacgtggacgcacggttcgagttgcatgggcttatccatgcgcaagaggcgagaggagcattatgtcgatgaaaaaggaatggaaacgcgaacaggcagatggcaccaccatcttcaggacctgcgcctggtctcctccgggcgagcatccggtcggatggggcatggagctgactgttgacgcggaggggaacctcatcaaggtcgagggggacaaagagcatccgatctaccaggggcgcctgaacgctacaggtctcgatttggtcgaatacgtcaaccatcccgatcgcatcatctatcccatgaagcgcgcccgcgaagaccgcggcaaggacaagtgggagcgcatcacgtgggaagaggcctacgacatcatcgaggagcaggttaaggatatcaaggaaaagtacggcgcgcgctccatcatggttcacggggggacgggccgcgaagcggtcatgtacagctaccccctcgcgttttccgtgctgcaaactccgaattactgctattcgcaatcgggttggtcgtgctacgggccccgtacgacggtgtccgacttcattctgggcgcgggctatcccgagatcgactacgcgggcttcttcgagcagcgctacgacgatccgaactacgtcgtgcccgactacatcgtatgctggggcaaggctccgctcgcatcgaatcccgacggtctgcacggccatgcgctcatcgacctcatgaagcgcggaaccaggatcatctgcatcgatccgcgcgttacgtggctcggatgccgcgaaggcaactggacgattcagatcaagccccaaaccgacacgtgcctggcgctggggctcatcaacatcatcgtcaaagaagatctctacgatcacgacttcgttgaaaactggtgttatggcttcgaagagctcgcggagcgcgctgcggagttcccggttgactacgtgtccgaagtgacgtggattcccgaggatcagatcatcgccttggcgcgctatctcggcacgcatcatccgggtgccatggcatggggcctcgccatcgaccagcagtccaacggcatccaagcggggcacgccatcctcgcgcttgcggccatcacgggcaacctcgacgttcccggcggtctgacggtcggcgcacccaacagcttcatgggcaagtggcgcatggacagcaggcaattcgtcgcggaagaggattgggcgcagcgcatcggggccgaagaatatccggcgctcgcgtacacccatgcaaccacccatcccgatgtcacgctcgacgtgctcgagacgggcgatccctacgagatccatatgagctggttcaattcgacgaatctgatcgctcccaccaattccgcccagccgcatcgctggtacgaagccctcaaaaaggtcgacttcgccgtatgcaccgacttgttcatgacccccaccgcgatggcgtttgcggatatattcctgccgctttcggccttccccgagcatgacggcatcgtgcttccgcactacgggcgcaactcggtgttcctgggttgcatgaacaaggcttcaaggcgcggtgaatgcaaatccgacctcgagatcgatctcgagctgggcaagcgattgaatccggccggctggccctacgattcggtcgaggatttcttcgattcgctgctcgttcccgaatacggtttcacgttcgacgatctgcgccagatcggttgctatcagccgagctatacgtacaggaagtacgagaagggcatgctgcgtcccgacggcgaacccggattcaacaccgtgaccggcaaggtcgagctgtattccatcgtgtacgaggcgtggggcgaggatccgctgccgtacttcgagaagccccgctgggacgagacgagccatccggagcttgccgaggaatacccgcttatcatgaccaccggcgcccgtgattacgcctcgttccattccgagcaccgccaattggcccagatgcgcgagatcacgccgtggcccgtcgttgaaatccatccggaaaccgctgcaagctacggtatcgaagagggcgattgggttgagatcgcaagcccgttcggcaaggcgcgcgaaaaggcgcacatcaccgccatcatcgatccgcgcgtcgtgcacgcccgccatggctggtggtatcccgagcaggacggcgaggagcccaacctgttcggagtttggaaatcgaacatcaacgagttgctcccgcataaggagatcggcaagcttggcttcggggctccctacaaaggcgtgatgtgcgagatcagaaaagtagacggactgagcgattagacggaaggggaagcagatgagcaaggattttgcactgcttgtggactataagtactgctccggctgccatagctgcgaggtcgcatgcaaaaacgaacacggcttcgagatcggcgcgtacggcataaaacttctcgagaccgaaccgatgaagataggcgagggcgcagtcgatgcttgggattggatataccttcccgtcccgacggctctgtgcgatcactgcgccgcgcgtctggagaaaggcgaggagccgacgtgcgtgaagcattgccagtcgttctgcctcgagtacggcagtttggaagacatgcagaagcgggcggccgagcttgatcgcaaggttgccgtttacctgccttaaccgagaacggaggaacatcatgacgattgatgagttgctcgagctcgatgacgacgcgcaaatcgagtatctgaacggccagctggacgacggcaagtcggtcgacgagatatgcgccgacctttcgacgacccgcatggacatggctcgcgttggattcttcgtggtgaagaaccgcttcatgctgaagccgacccgcgggtatgcgcgtacgaagccaaccaagctgggctgatcggctggcgcttcgccgtaagcgctgcgccgcttcgaacggaggcggcgcagcgcaccaccgaaccccgagagaaaggtatatacttaccatgtgttttagacctgctgacgcatccgctacggggccttctgcgtgtcccagttgcggtaagaccatccagagcatgggtggcatcgctttgaagaaatgtccgttttgcggagttgagctcgcatccgcgcccgaatcgcagaaacccgctgcttcagctccatccgctccaaaagcacccggtgctcccgccgctccgtcggctccgaagccgccccagtaggcgcgggcagcacggcgttcgagtaaggggaaaccatgtgcggttattcgtgtaccggttgcggcgagtgcaaagggaccggaaagcgcaagagaatcgttccgaggggattgtgccggcactgcggtacgctgaacggaccgcgcgcccttacgtgctccgcatgcggaaaagagctttccgcagcgcaaggacgcatggaagaggtgctccgtccgaaatcgcgttgagtttccacgctcaataaccacctgtttcatttgactggaaggggatttgtatggaaatgactacaggcacggcatcgaagcctgccaaagaagccgttccgaaaggcgcatgggctattctcatcgccgtctggatcgttgcgattgcggcacctttgaacatgttcaagcccgcaacgatatcggtcgaaatcatccaggcgctcaacatcgcagggtcttcttatggttggatcatgtccgtgttctccatcatgggtttgattttggcttttccggcaacggggctcgtgtatcgcttcggattgaagaaatctttggcggtctcggtgatctcgctgttcgtgggatcgctgatcggcgcgttgtcgacaagcttcgaaatgctgctcgtctcccgcgttatcgagggttgcggcatgggcttcatcggcgtggcgggcccgacggccatcagtctgtggtttccgaagagccgacagggctttgcggtggccgtgttccagacctggatgccgcttggcacgctcatcaccatgaacatagcccccgtgatggccgcttcgatgggatggaagtcgatctggtggctcgcatgcgcgtactgcgtggtcgccttcatcgtgctcatggtgctgttcaaagaaccgtcgaaagaggtcatggctgcggcggccggcaaacgcgtcgaggatgttgccgccgacaacaagttcgccgccttcaagaatccgtcactgtggattctctgcatcatgtttctggtgttcgccctcacgacaacgggcaccacgagttcgtactggtcgctgtacctgcgcgaggcggcgggcatcgacgcttccgttgcggcgttcgcggtcagtctctgcacggtgctcggcgcgatcggcataccgttcggcggatggctgtcagacaagctcggcacgcgtaagtggatgatcatcgcggcgtgggtggttgtgctcgtgttcctctggttcgcgttctctacgaccgatctgacgctcatctacgtgatcgcgatcgtaaacgggttctgccagggatggattcccgcgatggtgcagacatccattcccgagattctcaaagacccttcccagaatgccatgggcatgggtctcatgaacgtgttccgcaacggcggcaacattttaggcggcatggcgctcggctacttcgtcggtccgttcggctggtcgctcggctcgcatatcctgtgcctgcccccgatcatcatcgtcgtcgcgctcatgctcatcatcacgcgcaaaacccttcggtaaggcaattcggcgcggcttccgcagagatatgcggaagccgcgtgcatggctgacaactagtgtgggggtgaattgaccatgttgaaagacaagtcagtagctgcacggattgcatgcattctcatcgcgctcggcatcgtcgtcgttgctttggcgctgccgttgcccgaggggctttcgtttccggggaagatgagccttgccctgctcgtcgcgggcatcatcctatgggtggccgagcccgttcccttcgccataaccggtatcgccatcatgatatcgctgccggtattcggtattcttccgttttcggcaagcgaggggacgacggtatggctcgcttgggtgagcagcgtcatcttcttcgtgctcgcttcgttcgggctctcggctgctctgctcaaaaccaagataccgatgcgcatcgtgtcgtttctgctcaagttcgcaaagggcaacgagaagcgcgtcatcttctcgttcatggcggcgacgttcgtctgctcgatgttcatctccgatctgccttgcagcgcgctgttcgcgggcatcgcggtgagcagcgtcttgcagatcgagggtgccgagccgggaaaatcccgctttgggcgcgcgctcatgatctccattccgtacgccgcctgcatcggcgggcaggcattgccgtcgggcagctccatgaacatcatggccatgggcatgctcgaggcgagcacgggcatccagatatcgtttctcgattggtccgtcatctgcacgcccatcgccatcgtgctgctgttcgtggcgtacttctcggtcgtgctggtgcacaagcccgatcctctgtctgcgaaaacgctcgagcgcatcgccgaattctcggcaaacaaggagaaattcgaagcgctcgattggaaggtgctcgccattttcgtgctgacgttcgggctgtggctcgccagcaactggacggggtgggatctgaccggcatcgcgctgctggcgctcgttttatgcttcgtgcccggcatcgaggtgctttcgtgggacgagttcgtcgagagcgtttcgtggaacgtgatcctgctcatcggatcagtgcaggcgcttgccggcggcatccgccagcagggttctgcgagttggtttctgcaggcgtcgatcggcaagcttgcggtgggagcggggctgctcgtggtggcaacggcggtcgtggttccccttatccgcctgttcataccggtgggcccggcgcttatcggaacgacgcttctgcccttgtgcatgatcggcgagacgttcggcatcagcccggtgttcttcacgatcgtggttgccatcagcgcatcgacctcgtttgcaaacggtttggaaagcgcgagcatggtggtgcacaagtacaactactggacgctcgtggattacttcaagtcgggcgtcatcccgacgatcgccctcatgatcctgcatgcaacggtgttgctgccattggttacgatgatgggctactgacgaaagccgcactgccgcttgcggctgcgatacgcaggcgttttgggctgtgcgcaaggggccttcgcaatgcgcgctaggcgatgcgctctgggaccctgccgacatcggcgtcggcagggtccttccgtttcggtcggactcgcactcgtcgcgcctatcggctgaaacgggcttttgctcgccgcccggatcatgcggcttgtctagtggtgctctatcgtatcgacgagatccatgagctcctgttggctgtgcacgtcgagtttccgatagatgttgcgcatatgggttcttacggttccctcggatatgacgagttccttttgcacgtgggcggcgttgcgccccttggccagaaggcagagtatctcaagttcgcgctgcgagaggagaaacgtgtccgctaccagatggcagcgttcgctgaacggtgcccgccgcctctgcggccagtccgaagaggcgcgttcctccgtctgggaattggcgagcgttgcgatttcgcgcatctgctcgttggtgacaagcgaaaggaagccgagcgtgaccaacgcgaggcggacgagggtgatcaggtagtaagggatcgaatcgagaggcatgaggctgttcgcgacgaacactgcgagcaggcccaagacgagaaagccgttgaagaacccgaacgtgatcatggacgagatgcggtatttcatcgtgagctctgccgggtacagccagaacacgacgcttgccagagcgagcagggctatgcaggtgtagttcggattccctgcgtcgagcaggccctgcgagcaggagaacaggaggaagacaagcagggggcacagcgtctcaacgggaaaatcttgcgtgaggggcgctttccacagaagcgagcgatagccttcgagcagcagcgacccgtaaacgatgccgaagggaacggcgcttttccccagccgcaaggcgaacgcccgcttgctgatgcgcagattgtgaaacgtttcgacccaggctttgccctctttcgcccgcgtggtgccgtcgggcagggttacgaactcttgcggtttgaagtagctctcgttgtcgtgctgcgccttgtagacgaaaacgaccgagaagaggggtccgaggcatgcgataaccacggctccgaaagggctcgtttcgacgaaataggccaaggcgagtatgagtgcgaacgccaaaagcagcgaaaggatggttgcgagtgcaagcttgctctggtctcggcggcgggcggcctcgccccagagaagcgtcgcaggcgcgcacgcgaagcttgcaagcacggttcccgccagggcgagcgcgaacggcgcttggacatccgacagcatgacgctgcccgcgcacagcatcccgatcgccccgcacaatcccatgaggaaatgcaccgattttttgcgcagatatcgagtgaccctatcgcggtagtatccgatggcgaagcaggttgcgggaaatacgatcagaaaggagaggccgagcgaaacgaactgcagctcgttgattgcgcgtgcgttgtcgtagaggaagaacgcttggaaaaacaggatgaacagccagaaaagctggacggcgaagccgatgaccagtgggctttctatgtacaccgcgttgctgagggcagtggttttattccgaaatgcccccgcgtttgtattgagcatggcgccccctgatgcgcatgtcgaatgaatctgctgcactctacccgagcaggacttgcttccactgcttgcattatagggcatttaggagcgcggtgccctggcgcggcgcgctcgcctcggtttgggtgcgggccgcgcgcattcgcgggagtttgcgctatcatgaatccatgaaaacgttagcgatcataggcggcggcgctgcgggccttgcggcagccgtcgaagcggcgcgcgaatcccgtcggcgctccgcaagaatggagataaccgtatacgaggcgtcggatcgcgtcggcaagagcattcttgcgacggggaacggccgctgcaacctgtcgaattcggcgatcgatgccgccgtataccgaaatgcggagttcgtccgcgaagcgtatcgggcattgccgcccgagaaggttcgatcctctttcgcggatctgggcctggtcatgcgcgaggaggccgaaggccgcatctatccgctgacgaacaaggcgacctcggtgctcgatgtgctgcgcttcgccatccgcgaaagcggcgtgcgcgaatcgtgcggcaccgaggtcgttgccgtcacgcccgtcgaagaaagattcctcgtttgctttgccgacgggggcacggttttcgccgacgccgtcatcctcgcgtgcgggggaggacccgcgcaatcgcttctgcctcccgcatacccctatgcgggcgttctgcccgtgctcggtccgctcaaaacagatgtcgcgcccatcaagggcctcaacaacatacgcgtgcgctgcgaggtttcgctgtacggccgcccgtgcgaatcgggcgataaggcggctgggaggcgaaaggctttgccgtcggcttcgctcaaggcatgcgaggcgggcgaggtcctgttccgcgattacggcgtttcgggcatcgcgatcttcgatctttcgcgttttgcagaagcaggcgacgtcctttctctggatctggttcccgaaacgagcgaggatgcccttgcggccgatctctcgctgcgcgtcgagcggttcggctcacggggcgccgtagagcttctttcgggcatgctgctggctccggtcgcccgagccgtgtgcgcgtcgatcggcatgcgtgcggacgaccccgttgcccgcggccggacagcggatctcgcctgcgccgtcaaatcgttcaggctcgaagttcggggtgccggggatgtgcggcaatgccaggtgagccgcggtggcttcgaggttgcgcctttttcgcccgatacgatggaatcgcggctccacgcgggtctgtacgttgtcggcgaagcgcttgacatcgatgctccctgcgggggatacaacctccattgggcctggacaagcggcgctcttgcgggacgggccgccgcggggcggtgcgcgtgatgatcgaggtatcgaatctgcgagtcgagctcgacgacttcgctgcaggtgccgatgtcgattcggcgctgcgtgcggcggcgtcgcgtgcgctgcggatttcgttggacgatgtggccgaagcgaggcttgcgaagagaagcgtcgatgcccgaaggaagagcgacgttcatttcgtctgcacggttgcggtttcgctcgctgacgaagcgctcgaagaccgtcttgttgcaaaaggcgcgaagcgccatgctccctacgagccgcttgccatccccgacctttcccagcgggctttcgttcggcctcggagcgcgcaaggcgtttcggtgcaaacgagcggtgcaaggccgcttgtcgtgggtgcgggcccggcggggcttttcgcggcgctgtaccttgcgcgggcggggctgcgcccgctgctgatcgatcggggtcccgccgtcgaggaccgcgtttcggccgtcgccgagttcgaacgcacgggcgtgctcgacgaggaggcgaacatccagttcggggaaggcggagcgggaacgttttcggatggcaagctgacgacgaacaccaagaacccctacaccaagcatgtgttgcgctggtttgtcgaagcgggagctcccgaggagattctctggcaggcgaaaccgcacatgggaaccgataggctcgttagcgtggtgcgctcgatgcgcgaagccatcgtggaggcgggcggaagcgtcaggttcaaaacccgccttgagagactcgtgttttccgacggcgctctttctcgtgccgatctgatcgatggggaaacaggcgaaaccgaagccgtggatgtggatcgggtcgttctcgcatgtgggcattccgctcgcgacacgttttcgatgctgcgcgatgcgggcgtagccatggagcgaaagcccttttcggtcggcgtgcgcatcgagcatgcgcagaaggcgatcgaccggtctcagtacggggccttcgcatcgcatcccgccctcggcgccgccgaatacaagctggcggtgcacctgccgagcgggcgcggcgtgtacacgttctgcatgtgtccgggcggcgaagtcgtctgcgcggcgagcgagcgcgacggcgtggtcgtcaacggcatgagccgatatgcgcgcgatggcgcaaacgccaacagcgcactgctcgtgggtgtggatccgtctgattttcccggcgacgatgtgcttgccggcgttgaattccagcgacgcatcgagcgtgcggcgtatcggtgcgccatcgaagcggggggctctccttatgcggcgcctgcttcgacggttggggatttcctcgcggggggccgcacggctttcgcgccatccgtttcgcccacctgcgcgcgcggcgttgcctggtgcaaccttcgggagtgccttccgggcttcgtggcggatgcgattgccgaggcgctgccgttgcttgacagaaagctgcatggcttcgccgatccgcaagcggttctgacaggcgtcgagacgcgcagctcgtcgccggtgcgcatcgttcgagacagcggattccaggcgtcgctggcgggttcggccgcaccggctgcatccgccgtgtcgactgcgccgcccgcatctgcgacgggcttgtatccttgtggggaaggtgcggggtacgcgggcggcatcatgagcgccgccgtcgacggtcttcgcgtggccgaggcgctggcggccgaggcgatgctctagccgaatggccggcgcacatgcggccaaccatgcgtgcaaaccctcgatgtttcatcttttcccgacgttttgctccggcttgcccgctcgtttggcgtcggcgtgcccgctaacttgttcgttggcttgcccgccggttcctataggcccatctcttttttccagtcgatatcggacggcgggacaaggcggtcggcttctggcgcccagaggcaggattccatgtcgacgtgcatatcgtcgacaaacgccactccctcgtcttcgaggagcttgcgctgcacgtctgggccgccgaacgcgtatccttcgcaaatcctgccgtccttgaagatgacgcgatggcagggcgtggacacgggttctttgttgccgcgcagcgcccagcccacgtagcgggccgagcgaggggagcccatcatgcgggcgatctgtccgtaggtggacacttttccttcgggaatctgctttacgatatcgaacacgcgctccgaaaacgtcggcatgggttctccttcgtgtaatgctttgcggcttatctttggcaaaaccgtaggataacacaggcggtagtcgcgttttcatgaaggacaagcgcgttttgcagtgtataatctcccgaacaaaagaagacgtctcaggcgaggaaagccgggtgcgaatcccgcacggtaccgccactgtgatttgggcgccagcccattcagccagaacacttgccgagaagcgtgtctgcgtgagcagcgagctactgcaatcgcaaacccgggtgctgcctacgggctgcctcggcttattttcgagagccgaaacgggccacgacgcaatggtcgcggtatcgatgctgtcttctttttcgatggggtatacgacgaaaggagcaggacagtgattcgatcaaacgaccgcgccgcgctcggcgcgcaggcgggccgcacaatccatgcgaagatcggggcggtgcttctggcgctcgcgctgtgtttgagcttggcgcctcggacggcattcgccgaaaacagcgcctcgggcgatgcgcaggcggcgccgatggcttcatccgagcagacggccggcaccgccacgttgacgatcgtctacggcctcgatttcgacggcagcccgaatgtcgtggtgaatacgaagtaccggttttccgaaggtgcaacggtggagggcttgtttgccgcagcgaaagccgcgggggagatcaaggactacgtcttcgtcgacgagggctacggatcctacattcggtcggttacgctgaaaaccggagcagtcgtggagaacgcgcctgacgggtctctgtattggggaagctacaaaaacggagcgtatgcggtcgatgcggaagcccagggcaccgaagcgcttgccgacggcgcatcgtaccaattcgcatggtcgagctatccgacggcagccgctccttccgattggactccgatcgtcgatgcagcggatgcgagcacgcagatcgcgggaggcgatgcaaagaagggcgtcgcaacgctttccgttgtggcgggccttgatctttccggcaaaccgatcattgcggtgaacaagcagtatccgtttgcggaggatgccacggtggaggatctgtttgccgcagcgaaagccgcaggcgacatacaggattactcgttcaaggatatgagctacggcccctatcttttctccgttacccccaacaagggagcaacgcttgcaaatgcggctggatcgcctctatcctggtcaacttacaaaaacaagcagtatgcgagcggtaccgaaggacaaagcggggacgcgctcgtcgatggagtaacctaccagtttgcctggtcgagcttccccaccgcgcaggcgcccgccgactggaccgccctcgtcgcttcggcgaccgatggctccgaggtggcggttcccccgatcaagcctccgacaaccgacgaaacctatgatccggtcgctcttgacagcgaggcttacgcgcagcttttctcgtcgattgccagctcgtttgcggcgacggccgaaccatgggaggcgcttgatctcgccgccatcggccagtcctcggccgtcgacaaggatgcgcttgtcgattcggcacgcgaatcgatcggcgttgccaatccgacggctctgcagaagaacattctcgccctcacggccatcggcgtcgatgccgatggcatcgcaaaccaggatggaacgagtttgatcgactcgctgggttcgaccgcgatagcgaccaacgggatcaacgggcgagcgtttgccctgctcgcatacaagagcggaccctatgccgttcctgctggcgcttcgtctgagcagcagctcatcgacgacgtgcttgcaagccagcttcccgatggcgggttcgcgctcgacggcacctctgcggcggatcccgacgtaacggccatggtgattgccgctcttgccccgtaccgcagcgatgcgcgcgttgaggcggcgttgcaagatgccctttccgcgctcaagagcctgcagcttgccgacggaggttttccctcgctgggcaatggcggccttgcgactcagtcgaatgtgaactcgacggcagttgcggtgatcgcccttgccgccgttggaatcgatccagccacgtcatgggccgtcgagagcggcgagacgcccctgtctgcgctgctgtcgttcgcaaacgagtcccgaaccggattcgttttcggggcgagcgaaaacgagatggccaccgagcagggattccgtgcgatggtcgcctatcagggattcaagaacaccggtgccgcctacaacgtgtatctgcaggccgcggatggcgttgcggggttgcccggcgcggcggaagcgcctgcggccaatgacgatagactggcgaaaaccggcgacgcgactcccgtggcgggtgcggcggggatcgcgctgtgcgcgctcgtcggcctcgcggctgcggttcgccgacgcggcgtttgcagccagcgggcaagcatgaggtaggagaccttcgtggacgatattccaaagcgaaccgtcggccccgatgccgaatccggcgatgatccgttgaagaccgagcggattgcatccgtcgcaattccccatggtgaaaagccgggcgagttggatccgacgggtgccgaggcgatcgagccggccgtcgagaagggcggggatgctgccgatgcgcaggtcgatcctgccggactcgatttggatgcgacgggaaccgaacccgcagaatcgcgtgccgaagacgatgaagctgccagggcgcaggatacggtgcgcattgcccccggatcggccgacgccgtcgcagtcgaggatgcggcgggcgccgagcggcgcccttcgtggaagcgtccgcgaacgataggtttggcgctggtcgcccttgtgctcataggcgtcgtggggcttgccgccgcacaggcgtcggggctggtttcgatcgttcccgccgatctgctccaaacgaccgggcgatcctcggcgcccgcttcgggagatgacggccggggagcaggcgacgagtcgaagcaggaggcgcttcgcgcggaagaagacgcctccggggaagccgagaccgaagagacgggcctcgatgcgcctcccgatgacgagccgcccgtcgccgacggcgccgattccccatcagggggatcggcggacggttccgattcgggtgcgtcggcgcccgccgccgcacccgcacccgagccggatcccgctccggctcccgcacccgagcctgcgccggcccccgcgcccgcaaccatcacggtatcggtgtacgtcgatagctcgcgtgccgcaagctacgggtattcgtcttgtctggcttcggcctcggtgacggtaccgcagggcgcaaccgtgtacgacgcccttgcggcgacgggcgtttccgtgggcggatcgagctcgtacgtgagctcgatcggcggccttgccgagttctcgtgcggcgccaatagcggatggctctactacgtcaacgggtattcccccggatacggtcccggttcgtatgccttaagcggcggcgagagcattacatgggtgtacaccctcgatctgggagccgatgtgtaaccgatggatccgaggttcgaaagcgggggagcagctacggtattcgagcggtaccatccggtcgtcgcgttcgcgtactttgccgccatgctcgtcatgaccatggcggcgatgcagccggtctacaccgccgtttcgcttgcggcggcggcagcgtgcggcatatggctgaaaggtccgtcatccacgtttcgcgctatggcgatgcagctgcctttcgtcgttctcatcgcggtggtcaatccgctgttttcgtcaatgggctcaaccgagctttttcgcatcgggcatcaggcggtgtatgcggaaagcttcgcctacgggctgtgcatgggtttcatgctcatggcggtgctcttgtggtttgccgacgcctcgcgcatcttgaccaccgacaagatcatgctgctgttcggcaacgttgcgccgaccatcgcgcttgcgctttcgatggcggcgcgtctggttccccagttcgtcgggcgcggcaaggagatcgaatccgtgcaggccgcatgtttgaaaacccgcccgaaaacgctgcgcgagcgcgtttcgtggatgggtcgcatcgttacggtgctcatgggctgggcgatggaggattcgcttgagcgggccgatgcgatgaaggcccgcggatggggtgcttcgtccgtgcgcacgcggtatcggccgtatcggttcagggcggcagacggcatcgcctgcgccgtgctcggcatcctggtgatcggcaatgcgcttcttgcggggatcgcctgcgcgcagtacagtttttacccggctatgagcgaacttgtcgtctggtggggttatgccccgtatgccctccttgccttccttcccctgatcgccgaaggagtcgatcgcgtgcggtggaggagtatcgaaggtgcgatgcgatcgtcgcgggaggtttttgatggacgcgcttaaagtggacggcttcagcttctcctatccgggggaggaccccgtcttgagggatctgagccttcgcatcgaagaggggtctttcgcgcttctggtcggcaggacgggatgcggcaaaacgacgctcctccggtgctgcaagcccgagatcgctcctgtcggcgagcggcgcggctcgatagaggtgctcgggtctccgctcgatttttccgataggcgcagcattctttcatcggtcggctacgttttccagagtcccgaaaaccagatcgtatgcgataccgtcgtgcatgagcttgcattcgggctcgaaaaccttggcgtcgattccgatgcgatgcgccgccgcgtcgccgaagccgctgcgtttttcgggatcgagccatggctgcatgcggagaccgcccatctttccggcgggcagaagcagttggtgaatcttgcggggatccttgcgatgcagccgaggctccttctgcttgacgaaccgacgtcccagctcgatccgatcgccgagaagagcttcctccacgcgctgttccgaatcaaccgagaactcgggataaccgttgtcgtcgcaacccatgcccctgagtcgatgaccgattacgcgaccgaagccttcgcgctcggcgatcggggaatcgagagggtggcgctcggggagctcgtcggcaatccgatgccgcgcgggcagcgccgagcggccgggagcttgggagaatcgtgcgtttccggcaccgacgtgttcttccgatacgcgcgcgatcgggcttgggtgctgcgcggcgccgatatcgatatccgcaaaggcggcatccatgcgctcgtgggcggcaacggatcggggaagtccacgctgctgcgccttgccgcgggggtgctcaagccggagcgcgggcgcgtggaaaacgcgctgcggtcgcgccaggcgctgctgccccaaaatccgaaagcgctgttcgtgtgcgataccgtgggcgaagagctgcgcgagtggcaaagcgcgtgcggatacggcgagccggaggttttctcgatggccgagcgcttcgggctgtcggcgttggcacatcggcatccgttcgatctgagcggcgggcagcagcagagccttgcctttgcgaagctgctgctcacagagcccgaactgctgctcctcgacgaacccaccaaggggctcgacgcgaacgcgaagctcgaattgggaagcgctcttggcgatctgcgcgggaggggggcgacgatcgtgttcgcaacccatgaccttgcgttcgcctcggttctcgccgacgaggtttccatgctgttcgacggcgccgtggcaagcaccgagccagtggatgcgtttttctcgaacaacctgttctaccgctatcgggaggatgggtttttgcggttgtgggcaagccagggccttgccgaggaggtcggctgagatggccgcccggattctttctcggctggaaatccccgcgctgctcgccgttctcgccggactcgggctcagtgcggtgtttcagatcgatcagacggcgcttctctcgatgggcgtggtcgtcggcgcgatagtcgtgttcttcgcccgcttcgaggcttcgcagccgatgcttcgccagatcatgcccacggttgtgcttgcggccctcgccgcagcggggcgcattctgtttgcggcggtgccggacttcaagcccgtttcggcggttgccatcgtcgcgggtgccgtgttcggccggcaaacgggtttcatggtgggcgcgcttgcggcgctcgtgtccaacctgttcttcgggcaggggccgtggacgccatggcagatgtacgcatgggggcttatcggctattttgccggtgtgcttgcagaccgcggagcgttcgaaaagcccgtgcccatatacctgtatggattcgcggcgcctttgctctacgggtttttgctgaacagctggcatatcgtgggatacgttcaccccatcacgtggcagacggcgcttgtcgcctacggcgcggggcttcccttcgatctcgttcacggtgcggcaaccgtgctgtttttggcaattctctaccagccctgggtgaaaaagctcaagcgcatcaagggaaaatacgggatctgaggcgcatgggcggcaccgtttcggcaggctgccgtttgagcgcagcgcctgccgtttcgtgaccggcatctgcggtcgtgctacaatgcatggcccggcgatccgcctatggcgggcggttgccgctgttgaatcgatgcacggagccgttttgcgcgcatgcggcagaaagcgatgcgactatggaagacagcgaatcttacgaacggggcatggcgagcgcggtggcggcgctctccgcgggtttgcccgtcgtgttccccaccgatacggtatacggcctcggcgttgccgtcggcatggcgaaaagccccgaggtcctctacgacatcaagcggcgcgaccatggaaagcccgtggcatggcttgtgggcacccccgacgccttgtcgctgtacggcaaggccgtgcccgaattcgcgcatattctggctcgaacgttttggcctggccccctgacgctgatcgtgaaggcgggcttgaacgtgcccgagcccttccagtcgcaaagcggaacgatcgcgctgcgcatgcccgacaacgcgctggcgctcaggctcatcgagcgggttggtttccccttggcaaccacatcggcgaacataagcgggcagaagcccccgcgggtattcggggagctcgatcccgccttgcttcgcgaggtgacggttgccctgcgcgatgacaccgagaagagcggggtcgcgtcgacggtgctcgactgtacgggcgatcatccggccatggtccgcgaaggcggcatctccattgccgacatccaggcgctcggctagggccgtgcgggggcggagccgccttcgggtttcggctgcaggccggcgatcgccgtcgccacgggcgtcgtattcgactcgatatcgcagcgagcgtcggtggggctcgggttcgggtataatggtgtttcagcaaccttgagggaggtactgccatgaacacgagcgcttcgcgcacgggtgcacgaacgtctgtaaaggccaacaagctcggatatcgttcaagcgatggaaagacccagatcagagcgcttacgtgggagcccgagaaaagccccggcattgctcctgccggaatcgtgcagatcgtgcacggcatgtccgagcacgtcgagcgctacgatgaattcgcccgttatctggtgagccgcggttatatcgtctgcgcgaacgatcacgtggggcatgggaaaagcgtctccgatcccagcgagtggggttgccttccgagtgtcggcggcaaggacgtgctcatcaacgacgtgcacgaactgcgcaagacggtcgcttcgcgctatgcgcggcagactccctacatcatgttcggccattcgatgggaagcttcatcgtgcgcgcctatctcgcgcgcaacgccgcgggtctcgccgccgccgtcatctgcggcacgggccagcaacccctgcttctttcgaagttcggcaacatcatcgcccgccgcatcgcctcatcgaagggcgaggcgtacaagagcgcgtttctcgacgggctcggtgccggcgccttcgccaagaaaatcgagaacgcgcgcaccccgttcgactggatttccaccgacgacgcggtcgtcgatgcctatatcgccgacgaatcgtgcggcgtcatgttttctgctggcggctacgcgaccctgaccgatctgaccggcgaagtggtgacggccgccgccgcccaggcggtccccgccgagctgccgttgcttttcatcgccggtgcgctcgaccctgtgggggacaacggcaagggcgtcgagcgcgcggtcgagcagtaccgtcgcgcgggcgtcaaggacatcgatctgaagctttacgagggcatgcgacacgagatactcaacgagcacggccgcgccgaggtttttgccgatgtggctgattggatcgatgcgcacaaggcgggttgatccaatcgcaggacgccgcggatgcgggtttcggcctgcggctgtttacgcgcacgcgcttgccctgggtgcgcgtgacggggcgacgtcgagcggaagcggcacgaagcgggcaggctccgcgcttgcttcgggcgcgcgtgttgggggtgcttgcctttgcctctcggccgatcgacggttttgcgcgttgcgcggccgtcgccatcgccgtatcatggtagcgagagaccccataccgtcctgcaatcgcattgaacgaaaggcacatgttcatgcccaagaaatacgtcgtcgcgctcgatcagggaaccacatcgtcgcgcgccatcctgttcgatcgggccggcaagctcgtcgatatggcgcagcatcccttcgaacagctctatccccagcccggctgggttgagcacaatccccaagatatcctgtcttcccagctggccgctttgaccgagctgctcgtttcccgcgatgtcgggcccggtcagatcgatagcatcggcatcacgaaccagcgcgagaccaccgtggtgtgggatcgcgagacgggggtacccgtatccaatgcgatcgtatggcagtgccgcaggacggcgcccatcatcgaagagctgtgctcggatcctgaggttgcggcgcgcatcacggcgaaaacgggtcttttgcccgacgcgtacttctcggcaagcaagatcaaatggatcctcgacaacacgcccggcgcccgcgcggcggccgaagccggtcggctcgctttcggtacggtcgatagctggcttgtctggtcgctcacctacggcaaagtccacgcaaccgatgtgaccaacgcgagcaggaccatgctctacgacatccacgagggccgatgggatccatggctgctcgacctgttcgacgtgcccgcgtcgatgcttcccgaagtgaggccctcgtcgtcgtatttcggcgagaccgcccatccgggcgttgtcggcggcataccgatcgcgggcgttgcaggagaccagcagtcggcgctgttcggccagtgctgctatgcggcgggcgaagcgaagaacacgtacgggacagggtgctttttgctcatgcacaccggaaacgaggcgtgtgcgtcgaagaacaacctcgtgaccaccatcgcggcatcgggccccgatgccgccagtaccgagtacgccctcgagggcagcgtgttcgtcgcaggtgcgctcgtccaatggctgcgcgacgaattggggctgatcgattcggccgaagaaacagagcagcttgcccgatccgtggccgatacgggcggcgtgtacgtggtgcccgcgttcaccgggctcggcgcgccttactgggatgccgaagcacgcggcgcgatctacgggctcacgcgcggaacgtccaaggcccatgtcgtgcgcgcggccctcgagtcgctggcctttcaggtgcatgacctcgtcagcgccatggaggccgatgcgggcaagcggatgcgcgtgctcaacgtggatgggggagcgtcggcgaacgattttctcatgcagttccaatcggacctcttgcagacgccgctcgcgcgccctcacaataccgagacgacggcgctcggggccgcctatcttgcgggcttgcgcaccggattttggaagagcaccggcgagctgtgcgacatgcgggcggaagacacgacgtttcatcccgatatgccgtcgaagacgagagacgcgctgcttgcgggctggcaaaaggcgatcgggcggacgcgcacggcgtagatgcgtccgattgcgggcggcgatgaaacggtgaaggcgaaggaaggttagcgatgaggatatcgatagcaagcgatcatgcgggattcgaacagaagcagcagctggtcgactatctggtttcacagggtcacgacgtcgccgatcgcggacccgataccgacgatcgcgtcgactatcccgattacgccgccctcgtcgcgcacgacgtcgccgaagatcgagccgataggggcgtgctcgtttgcggaaccggcatcggcatggccatggccgccgacaaggttgcaggcgtccgcgcggccaacatcgtcacccccgaattcgcggcgctctgccgcgagcacaacgatgccaacgtgatcgcgctttcgggccgtttcgtcgagcttgcggaaaacgaggccatcctcgatgcgttcatcgcaaccgagttcggcggcgggcgccatgccagccgcgttgagaagatcatggcgctcgactagtcggcatccggcagggggtttgcaggcttcctcgatgagcagcgtgttttccttgatcaaatgtggaatcgacgcatttccccgcgatgccttccggctgccggttcggggcttgcccgctttgccccgtccgtgaatggtacgaataagcaaacatataatttcattattcccgcctatgttcatataacatcttgtatactgagcgacgtgtagatgtacggtatttctaggagggaaattggaaacaacgaagaaatcgcttacaaagggggcgctgcttgcgctcgccgtcgcgcttgcggctacgatgctcaccgggcttgtggcatgcggcggggagtccgccgaggatgtcatccgcaaaggcgtgactgaggagcttgaaagcatcaagaacctcgaccaggccgctctcgacgagatcatggccggtgccggcgcggcgaacgccgggctcgaagagtacggcatcgacatggaggagttctgccgcacgtggctcgatgggttcgactattcggtggacaacgtgacggttgacggcgaaaacgccactgcaaccgtgaccatcacctgcaagtcgctcgcagagggcatcaacatcttcatggataaggtgacggcgctcaccgaggatcctgaggctatgagcaaatccatggatgagctcaaccagatgatgggcaccatgctcatggagggaatcggcgaggctccggttgagacgaacaccgtcgatcttccctatgtgctcaacggcaacacctgggagcccggccccggattcgacaccgcgctcagccaggcgttcgcaggcggtgctctgtaagctcggttgcagcgggaagcaaaggcttcgccgtatttcgatgagggccgttccgcatccgcggagcggccctttttcgcgcggtgcgcgaaagcgaacgcttgttgtgctagcatggaaaaaatcattttaccgaccttgttgaaaggggtatgcgccatgccgctgcattacgtttcgaaggaagatccacaggttgccgatgccatatcgcaagaactcgcaaggcagcgcggcagcgtggaactgatcgcgtcggagaacttcacgtcgcctgcggtcatggaggcggtcggcagcgtgctcaccaacaagtacgccgaaggctatcctgggaagcgttactacggcggttgcgaaaaggtcgacatcgtcgaagacatcgcccgcgcccgcgcgtgcgagctgtacggctgcggattcgcaaacgtgcagccccattcgggagccaatgcgaatttcggcgcctacacggctttgctggagctcggcgataccgtgctcggcatgagccttgatcagggcggtcatctgactcatggctcgcctgtgaacttctcgggcaggttctacaacttcgccgcctacggcctcgatcccgagaccgagacgatcgattacgacgacgtgctgcgcatcgccaaggacgtgcgtccgaagctcatcgtgggcggcgcttcggcctatccccgtacgatcgatttcgagcgcatggcggccattgccaaagaagtcggcgcctacttcatggtggatatggcgcatatcgcaggccttgttgccacgggagcccatccgagcccggtgccccatgccgatatcgtgacctcgacgagccataaaacactgcgcggcccgcgcggcggcttcatcctcaccaacgacgaggacattgccaagaaggtcgataaggccgtgttccccggtgcgcagggaggcccgctcatgcacgtgatcgcgggcaaggcggtcgcgttcggcgaagccctgaagcccgattatgcgacctacatcgagcacgtggtcgagaatgcgcgccgtctcggcgagggcatgatcgacggaggcctgcgcctcgtgtcgggcggcaccgacaaccatctgtgcctcgtggacctgactcccgccgacgtgacgggcaaggatgccgagaagctgctcgaaagcgtcgggttgaccgtgaacaagaattcgattcccaacgagccccgttccccgttcgtcacgagcggcattcgcgtgggttcggctgcggcgaccacccgcggcttcacggccgatgatttctaccaggtgggccagcttatcgccgcaacggtgttcaatgccgaaaacgatgcgatgctcgccgatgttcgctcgaaagtcgatgcgatgctcgaggcccatccgctctatccagaatacacttgcgcgtaagcgaccttgcggcggctgcgggcctatgccgcgcagccgcccggccgtttgcgctatctgcccgatccgaatcgatgaaaggtactcaagcatggctaccgaatacgaacgcgtgacccttgtcgaccatccgatggtgcagcacaagctctccatcctgcgcgacaaggacacctcctcgaagaagttccgcgagcttatcaaggagcttgcgctgttcgagggttacgaggcaacccgcaacctgccgcttgccgacgtcgaggtggagacgccgctgtgcaagaccatctgcaagaaggtcagtggcaagaagctcgccatcgtgccgatcctgcgcgccgggctcggcatggtcgaaggagtgcaggagctcatgcctgccgcacgggtcgggcatctcggcatgtatcgcaacgaagagacccacgaaccggtcgagtattacgcgaagctacccgaagatatcgccaaccgcgatgtcatcgtggtcgatcccatgcttgcgaccggcggttctgcgacggccgccatcgaatacctgcgcaagcgcggcgtgggcggaacgatcaacctcatggtgatcgttgccgctccggtcggcatcgagtgcgtgctcgatgcggatcccgatgtgcagatattcacctgcgccatcgacgaaagcctgaacgacgacgcctacatcgtcccgggattgggcgatgccggcgatcgcattttcggaaccaagtaggaggatccgatgagctacgacgaccgcccctcctgggacgagtatttcatgaagctcgcgaccgaggtcgcgactcgaaccacctgcctgcgccgtgcggtgggggcggtcatcgtcaaggaccgccgcatcctcgcaaccggttacaacggagttccgaccgggcttcgccactgcgctgaaacgggatgcctgcgagccgagctcggcgttccgagcgggcagcgccacgagatatgccgtggcctgcatgccgagcagaacgccatcatccaggccgcccgctacggcatcaacatcacgggcgcctcgatctacatcaccacgcagccctgcgtggtgtgcgcgaagatgctcatcaacgccggtatcgaggagatcgtgtaccaaaacccgtatcccgacgagctcgccatgtcgatgatcgaggaatcgggcatcaaggttcgcatcttcgaagggtagcgctcgttgcggcgcgtgcggggtggcgagcgcttcggctcgtctatgcgacgcgcgtgcctttcggcggcggctgcgccgtgcttgccggcgaacggtcgccgcgaaacgccgctctcggccgttttatgcaaaaccttgaaaccgtttccgcacatcgcagcgttgtcggatcagctttattcagtttttccgatcaagaggctccatttaccaagttttttcttcattttcgccgctttctcgcagaaggttgttgaagttccgttaccatactgatggttttgtatgacttgtacacgtttctggacagaaagcagaacatgatacttccgattgtgctcggagcggcgtgcggggttgttggcttcatgcccttgatagcgggtctcgggctggctcgaaaggccaccccgaccagtaatctcggtcatgcgggcgctttgcttctgggggtattcgggtcgttcgtgcttctcgcgggaacgcttatcgtctgcatcgtggtcgcccgcgatgcggtgttgccgttcacgcttgccgaggttgcggctttgatagtctcggcggttgtgtacggtgcgagcaaactggttaagaagtaaaacaaggaaagggttgatacgtggacgctcttgcagaactctcaaaaggggccgagcacctcgtgcattcgtttgattcggcgtatatcgtcggatcgggtgcgtttggacttactcagtacaccttttggatgatcatctgtctcattctcacggttgtggtggttttggcggcttcgaagcggctcacgctcgtacccaacaacaagttcgtcaacatggtcgaatacggataccagttcgtccgcaaggatatgggcgaagatccgatcgggcatggctacaagcgtcacatcccgtttctggcgacgctgttcttcttcattctcatcagcaacttcgtaggactgatccccggctgcaaaacgccgaccggttcgatcagcgtcacgtgggcgcttgccatcatctcgtttgtgtacttcaactactggggcatcaagagcaaggggggcttgggctacctcaagtcgttcgccccgtcgggcctgcccgtcgtcatggtgccggtcgtgtggttcctcgagcttttctcgacgatcctgcgcgccctcacccttgccgtccgactgtacggcaacatgttcgccggccatatggttctcggcatcttcgggctcgctacgagcgttttcatcacggcggcggttcagaacgccgatttcgtcatggcgcttccggctatcggctggatcgcgtttttgctgtgcatgtacgccctcgaggtgctcgtggctttcttgcaggcctacgtgttcaccatcctgagcgccgtgtacatcggtctggctacgtcggaccactaaatttggatttcgccggcgcttccactgccggtcgaaaatatgttgctaagtgtttttgagagcagactcaaagacggttaaaggaggaaattgtggaaattacacttggacttgcggccttgaaactcgtgggctacggcctcgcaacgttcggccccggcctgggcatcggcattgcctgctatggttgctgcatggctaccgcgcgccagcccgaactgcagggacgtctgttcacgaacttcatcatcggcgcagcccttgctgaggctctcggcctgatcggcttcgttctcgcgttcatcgtctaactttaggcctttattcggaaatctagccgtacaaaggctttaaggaggaaagcaagtgaaagcaggagcgaaaaaagcaatagctcgcacgggtgtggcaacactcgctgtcagcggcatgtctgttgcttttcccgcgctcgcgttcgcagctgaggaagagtcaggcggcatctcggctattctgcccaacatggcggaattcatcccgatgctcgtctgcttcatcattctgtgcgtggtgctgggtaagctcggctggccggctttcgccgcaatgctcgataagcgtgagaagaccatcaaggattctcttgagaagtccgaagccgctcgcatcgagagcgagcgcgtactcgaagagtacaaacagcagctcgccgaggcgaaaacgcaggcagcccagattgttgccgatgccaagaagaccggtgattcggtgaaagccgacatcacggcaaaggcgcaagaagaggccggcgatatgatcgcgaaggcaaaagccgccatcgaggcggagaagaaagccgccatcgcagagctccagggctcggttgccgatacctcgatcgccgttgcgtcccgtttgatcggaagcgatctcaacgatgacgagcaccgcgcgatcgtcgagcgctatgtgaacgaggcaggtagtttcaatgccaactaatcgtcttgtcatcaaggaagaagtagccacctacgcgagcgtcttgcttgacgccgctgcggaggcgggtggacaggacgccgtgctcgaggtgcgcgaccaggctgagcagatcgtcggctttatgcgttcgaacatggatctttccggtgctctggaagatacgggctatacggccgagcagcgcaacgagatcgcgcggagcgtgtttgccgcgttcgatccggtgctggtcaacgtgctggccgttatggcggagcgcggggatatcgcgttgttctctcgggttctcaagagctacgaggagcagatcgaaagcaagctcaacatcgccgtagtggatgtcacgaccgtggtgcccctcgacgatggcttgcgcgaggtcataaagaaaaaagccgaagccgatctgggcaccgaagtcgtactgcgcgagcatatcgacaagtccattttgggcggcattatcatgagtgcaaacggcaagcgaatcgacgcaagcgtcctgtcgcagcttgaaagcgctcgcagcgtgctaaaactatcaacagatggaggtgaatgctagtgactgaaatcaccgcaaagtctattgacgaggcactgcgcaagcaactcgatgccctcaataccagcgtcgaatcgcgcgaggtcggaaccgttatccaagttggtgacggtatcgcacgcgtcgacgggttgaaggacgctatggcaggcgagctcctcgagttcgtgggccagaacggacaggtcgtctacggcttggctcagaacctcgaagaggacgaagtcggcgccgtgctcctcggtgacgtcaccgcaatcaaagaaaacgatcaggtcaaaacgaccggtcgtatcgtggaagtaccctctggcaaggccatgctcggccgcgtcgtgaatccgctcggcatgccgatcgacggcaagggcccgattcaggccgacggcatgcgtcccgtggagttcaaggctcccggcgttatcgcccgccagcctgtgcacgaacccatgcagaccggtatcctcgctatcgactcgatgatcccgatcggtcgcggccagcgcgagctcatcatcggcgaccgccagaccggcaagaccgccattgcggtcgatgcgatcatcaaccaaaaaggcaaggacatgatctgcatctacgtcgccatcggtcagaaggcgtccaccgttgcaggcatcgtcgagacccttgagcgctacggcgccatggattacacgatcatcgtgagcgcttcggcttccgattccgcccccctgcagtacatcgcgcctatggccggtgctgcaatgggcgagtacttcatgtacaacggcgacgacggccagcccgccagcgccgagaacccgggacgccatgtgctcgttatctacgacgatctgtcgaagcaggccgtggcctatcgtcaaatgtcgctgaccctgcgccgtcctccgggacgcgaggcgtatccgggcgacatcttctacctgcattcgcgcttgctcgaacgtgcggtcaagatgtccgaggagaacggctctggctcgatgaccgctctgccgatcatcgaaactcaggcaggcgacgtttccgcttacattccgacgaacgtcatctcgattaccgacggccagatcttcctggtgaccgacctgttctaccagggtcagcgcccggcagtcgacgtaggcatctcggtttcgcgcgtcggcggctcagcgcagatcaaggccatgaagcaggtggccggctctctgcgcctcgacctcgcctcctatcgcgagcttcaggcgttcacccagttcggtagcgatcttgacaaggctacgatggatcagctgaaccgcggtgctcgcatgaccgagcttctgaagcagggtcgttacaacccgatgccggttgaggagcaggccgtcgccatctatgcaggcagccatggtttcttggacgacatcccggttggcgatgtggtccgcttccgcggcgagctgctcgagtacctgcgtgcctcgaatgcggagatccttgcgaatatcgtgaaagagaagaagttcaccgatgcgatcgagactgacttgaatgccgccatcgaggcgttcaagaaccagttctcgccctctgcttcggcgtaaggcaggtagatcatgcccaaccttcacgacatagaaagacgaatcaaatccgtctcttcgacgaagcagatcacgcgtaccatggaaatggttgcggctgccaagatccgtcgcgccaccgagcgcgtcgaatcggcgaccccgtattccacgtccatggtcgagatcctcgcaaacgtcgccgagcgtgtaggtggctctgaaaacgaactgctgcaaaagcatgacgagatcaaaaacgtgcttgttgtggttgtcgtgtcggaccgaggccttgcgggcgggttcaacagcaacgtgctgcgccacgtcgagcgcctcatgaaggaaaaaacagccgcaggcgcgcaggttcacattgccgcctgcggaaagaaggccatcggttatttcagttaccgcaagatcaaaccggtgctggagttcaaggacctttctgccgatccgacggtcgaagaggccactgcattggctacctacgccatcgcagggtataaagagggaagcctcgatgaggttatcgtcgtttataaccatgcgaagaatgcggccgagcaaacgctccgcgaggagctggtgctgccggtcgataccgcttctctgatcgaggagattgcggatgccgccgctgagccggcggaaacaagctcgaaggacgagccgtcgcttgcgggcgacgtcgtgttcgagcccgatgcggctgccgtgctcgataagctgcttccggcttacgttcgcaccacgctgtatcatgcgctgatcgattcggctgccggcgagcagggtgcccgccgtacggccatgaagtcggcaaccgataatgctaacgaaatggtcgattcgttgaccagattgtacaaccgtgttcgccagggcgccatcaccaccgagatttcggagatcgttggcggcgccgcggcattggaggattaaatggctgaaacaatgaatgatgcatcggccaaacagggagcggtaggacgcgtcgtccgtatcgtcggccctgtcgttgacgttgagttcccgccggaccagatgccggcgatctacaacgccctgaccgtgcatgcacagacccctatcggggaagtggacacagtactcgaggtgcaaacgcaccttcccggcgacctcgttcgcgcggttgccatgtcgtcgaccgacggtttgatccgcggtgtcgaagctgtcgacaccggcaacccgatcatgatgccggtcggccccaacaccttgggccgcatctggaacgtcatcggccagcccgttgacggcaagcccatgcccgaaatcgcggaatggatgccgattcaccatccggcacccgattacgatacgctgaccaccaccacggagatcttcgagaccggcatcaaggtcatcgacctcatcgaaccgttcgtcaagggcggcaagaccggcctgttcggcggcgcgggcgtcggcaagaccgttatcatccaggagctcatcaacaacctcgcgcaggagcacggcggcacttcggtgttcaccggcgtgggcgagcgtacccgcgagggtaccgacctctacctcgagatgagcgagtcgggcgttatcgataagacctgccttgtgtacggtcagatgaacgagcctccgggagcccgtcttcgcgtcggccttgcgggtctcaccgaagccgagtatttccgtgatcagggccaggacgtgctcttgttcatcgacaacatcttccgtttcacgcaggcgggctccgaggtgtcggctcttctcggccgtatgccctccgctgtaggctatcagcccaccctcgctaccgagatgggcgaccttcaggagcgcatcacctcgaccgagaccggttcgatcacgtcggtgcaggccgtttacgtgcccgccgacgacttgaccgaccccgccccggcgacgaccttcgcccacctcgatgcgaagacggttctttcccgcgccatcgccgagctcggcatctacccggccgtcgatccgctggagtccacctcccgcgcgctcgatccggagatcgtcggcgaagagcactaccgcgttgcggtcggcgttcaggagatcctgcagaactacaaggaccttcaggacatcatcgccattctcggtatggacgagctttccgaggagcagaagctcgtcgtgaaccgcgcccgtaagatccagaagtacctgggccagccgttccatgtggccgaggtcttcacgggcaacccgggcatctacgtcaagatggaggatacgatccgctcgttcgccgagattctcgacggcaagtgcgatcacatccccgagcagtgcttcgtgtacaaaggcgccatcgaggacgtgtacgctgcctacgataagatgacgaaggaagactaatggcgaagttgatatgcgacatcgtgactcctgcggctaagctttactccgacgaagcatatatggtggtcgtacccggcgtcgaaggcgaaatgggttttctgcacggccacgtgccgctggtctcggcgctttcggatggcgtggttcgcatccagggcgacaaggaagccgacaagcagcgctttgcgctgcagggcggttacgtcgaggtgaccggagacaaggtcatcatccttgccgatcgggcgctcccggtgtctgatatcgacgcggctgccgcccgcgcgaaactgggggaactcgaaacccagcttgcggcgctctccgaagaggaagccagaaggactccgcttgctgcggacattgcatggtgcaaagtgcagatcgcagctgttgaagcgtaacgctcgacggcgagatccgctagcattacatcggttgaaggcctcgggagcgatcccggggccttttttctgcgctgctttcttttgccctggtttgcgtgcggcttcgggcaattctacccgatgatccaggcgtggtagaaatcccatcgtttgccacccggctcctctaaagcggtcaaaaggtagctgccgacgagcgcgatggggtcgaggccttgcgccttcgcgcgagagaacagctgccgagcggtgctgccgtctccttcgacatcgacgcgcagcaggcattcgaggcattgcgatccaggggcgagatcctcgcgtttccaaagcgcctgcccgctgccgacgggcgtgtcgacgacggtttcgacgatggcctcgggatgcgccgcttcgatcagcacgccgtatctccagggttctcgtacgagcacctgccagatgtcagcctggctgtagtcgagggctgccatgcgctctatgccggccatggcgtgcctcatggtatcgggaagcagctcttcggtgcatgcgttgagctgtctttgacgctcgatctgctctctcatgctttcgagatcggctattctgcactctatatcttcggcggtccggtcgaggatgccgtcgatttccttcacggtaaggtcgcgataggctttgagatctttgacggaaacgccgagcttgcggtagaacgcaacctccccggcatcgatgagctcgcgcaccgagtagcggcggtagtcgtttgccgcgttgcgctcggggcgcagcaggcccgcgctttcccagtagcgcagcgtcgaaggcgcaacgtcgaggtagcgtgccgcgtctttgatgtcgtagcagatcgtcggttccatggcttcccttcatcggtttggagattcgaagaaccgctcaaattcttcctttaccttcaagtagctttaaggtttagagtaacacttgaaatgaaaccggacaacgcagtgatggaatgaatcatgataaccagagcaatgctgaaagaatatttgaagtacatcgtgcccacgatgctgacgttcacgcttgcaagcgtgtacagcatcgtagacggcgttttcgtggggcacgcggtgggggatgccgggctcgcgggcatcaacgtggcattcccgctcgtggctctcgtgatggccgtcggaacgggcatcggcatgggaggtggcgtcatatcgtccatcgcgaagggttcgggcgatacggctcaatcgcgtcgggccgtgggcaccacgtttctcatgctgctgttggcggcagttcccatcatggttgcgctcattctgttcgccgaacccattctcacggtgcttggcggcaggggtgaaacgctcaatcaagctatcgcctacattgcggtcatcgcttggggcgttccgtttcagatattcgtgaccggctgcacgccgcttatcagaaaccagggcaaggttgctttcgccatggtcgtgcaggttcttgccggcctgatgaacgtagccctcgactacgcgttcgtcattcttgcgggctggggaaccgccggtgcggctgcagcgaccgtcgcatcgcagattgcggcgtttgtcttggtggctgcattcttccttgcgaagcgcaaccgcatcgcacgtgccgacctgcgcttggacggccgcatcgccgctcatgtgctcaagctcggcatggcgccgttcggcctcacgcttcttcccgaggcaaccgtggtcgcaataaacgtgaacgcggtcgcatacggcggcgagacggctgtagccgcctacgcggtcatctcgtacaccgcttgcgtgatccagatgctcatacagggcgtcggcgacggcagccagccgctgatcagcaagcattacggagcgggcgatgccgacggcgtgagacgcttccgcaatacgaactatctgatcacgatcagccttggggtgctggggcttgcggccatgttcgccttccgcgagcagatcccgcttttgttcggcgcctccggaagcactgccgcgctgatcgcctgggctcttcccatcttctcggtggcttacgttttctacggattcacccatgcgtcgacgtcgtatttctatgcagttgacgatgcgcgcgcatcgagcgtcatcgtgtacggcgaggcggttctcgtggtgctcgtcgtgttcggcatggcgcgtatcgccgggctcgacggcatctgggtttcggtgaccatcgtgcagatggtgcttgcctgtgtggccggcgtgctgcttcgtcgccgccataggacgcgcgccgcccaagcgaagatggctcccgtcctcgagcagtcgtagcgcctattcgccgcgttgcgaacgtttctcgtcttcgatgatgtcgagcagttcttcgcgcgatccgacgttcatcttgcggtagatgttgtaggtgtgggttttgaccgtgtggcttgagatgaacagcttgttttggatgtgctcgattccccggccttttgcgaggtagtagaatacctcggtttcgcgcggcgagaggccgtaacgttctgcaagcgttgcgcagcacgccttccaatgccccggctcgtgttcgcctcgtgccgggccctcgcccgacggatcgcccgcgcctgtaccgtcttccgaagcagcgctgccggcttcgcctgcgcttccaggcgaagcctccccgttttccgtgccgtgcacgaagggctcggtaggggagaacgtcacgaatgccgccaacagtacgaccaggccgagcgctattgcggagagcaccgaaaggttgatggctcccgctgccgaggcagcaagcccgagcccgtatcccgctataaggcccacgcacagcgccgtttggcttctgccgatgaagaacagatacgaggccctgcgcttgttcgccgtctgcagctcgtaggcgatgctcgtcagcagcacgaacacgtacgcgccgagcagtaaaaggttgcagagcgtgtatacgacgttcgacatgaacgacatgggaaccagtgcgatgacgaggaaggggaacaccatccgaagcatgttgctctgcgcgatccgacctgcgaatctttgcatgaacgcgtaggcggcaagcgcgccgagcgctgcgagcaccgcgattcccacgaagagaaccgcatctcccgcaatctgcgtgacagatccggcgccgaggccgaacacgatgccgtacaccacgtatatcgccccgaacgcccaggacatatgggcgtttttcttcgattccgcgagcgggatcgcctcggcgctcgaacgctcggtttcgcggggaagcgccttgaggatgccgaggctgatgagcgggcaaacagccagcatggcgatgttgaatggggaggggagcatgtttatcaccagatagaacccgcagccgcacacgacggaaagcgccaggcatttcacgatcgatgcctgcgacactgcggaaaccgattcgacccacaggaagaacagacagcagagtcccgcgcccgccaaggcccagacgatgaggtcgaaaccgagcggatgggctgtctgcgtgatgaaatacgttgccgaagacacagccgcgatgatcgagaacaacgcgacgagcgccgtcatgacgttgcggcgacggttgcctatgacgccttcgggggttcgcgatacgacgaagctgcataagccgaatccgacgaagagggcgattctcaaaacgaggtggtgccagaggttctcgatgtccacatcgagaaaggagttgcgcatcaacatggaaagaaagaccgcccaaaagagggaaaacccgccgaccgccacgagaaggaacgcagatgacgccgcttgacgtggggaaacgtcgccactcatgcttttttccatagtctcgtcttgcatgttcccccaagaaaccattcgatcggtcgatggtgttcatgatacgcggtctctaaagtaaagacaagctaacgggcggccggcacgaggcggcaagacgcttcgccttccgtccgcatccagatgaatcccgtcttcggacggacgggtcagacggatgggcgagacgataagcgagtataaggaggtagcaaatgggaaccgactacaagctggtcgaccatgaaaagccgttccactatcgcgagggggactacgatgtgacgcgcggttgcgcatggacgggccccgggtgccatttggggtgcggcgtcatcatgtacaccgacgagcaaggcaagctcgttaagtgcgagggcgatcccgaggatccgtggaccgatggccgcctgtgcatgcggtgtctcgatgtgcccgaggttaccaatcacaaagagcgccttcgctatcccatgaagcgcgatcccaaagatcgcggcaaggatatctgggagcggatcacgtgggatgaggcttacgagctcatcaccgagaagttcatggacatgaaggaaaagtacggcgccgaatccgtcatcttcgcgcagggaaccggtcgcgacatcgccgcgtacatcacgcgcctgtgctggtcgttcggctctcccaactacacgggtctgctttcaggccaggcgtgctatctgccgcgtatcgccggcatggccgcgacgacgggccatccgtggatccccgacgccgcccagcagttccccgagcgttacgaccatcctgactatgaggtgcccgaggtcatgttcatctggggcaactatcccctgaaatcgaacatcgagggattctacggccactgggtcatcgacctcatgaagcgcggcatgaaactcgtcacggttgatccgaaggttacgtggctcgcttcgaagtcggagttgcacctgcgcgtgcgtcccggcaccgacgccgcgctcgcgctcggcatgatgaagatcatcatcgaggaagatctctacgaccacgagttcgtcgacgaatggtgctacggcttcgaggagcttaaagagcgcgccgccgagttcgatgtgaaacgcgtatccgagatcacctgggtgcccgaggatctgatcgtcaaggccgcccgcatgctcggcaacgcgaagaactccacgctgcagtggggcgtggccgtcgacatgacccgcgaggctatgcccgccggtcaggccattctcgctctctgggagatcacgggcaacatggagcgcccgggcggcatgatcgtggcgcccgagatcctctcggttgccggcggctggggccgcgaggtgctgggacccgagcaggaagccaagcgcatcggcatccaggactacccgctctacaacttcggcttcgcggtatcgcagcccgacgagacggtcaagaccatcgagaccggcgtgccctacgaaatccacggtgcatggctgcagaccaccaaccccatcgcctgcatgggagccgatccgcagcgtctgtaccatgcgctcaacaaactcgatttcatcgtggtcgtcgacctgttcaagaccccgaccatcgcggcgcttgccgacgtggtcctgcccgcccagacgttccccgagcgaaacggcatcgcgttcgtatcgggcgcgcagcgcggcagcaccatcaacaaggtgaccgatgtgggcgagtgcaaatcggacatgcagataaacctcgagctcggtaaaatgtggaatcccgaagcttggccgtgggacaacgtcgacgacatgttcaccgatatgctcaaaccgaccgacatgacgtttgaagagcttcaggaagtcgcgcctgcgtatcagcctatcgagtactatcgctacaagaccggcaagctgcgcgccgacggcaagcccggcttcaacaccccgaccggccgcatagagctgtggagcaacttctacaaccaggcgggtctcgatccgcttccgtacttcgaagaacccgagcccggcccgacttcgacgcccgagctcatggaagagttcccgttggtcatgacgagcggtgcaaggttctggggcatgttccactccgagcatcgccagatcgagcgcatgcgttactatcgcccatggccgctcatggagatccatcccgaaaccgccgaaagatacggtatcaaagacggggactgggtgtggatggagggcccgatgggccgtgccaagcgcaaggcgaagctcacccccgtcatggaccgccgcatcgtctcgtgcgaccacggctggtggttccccgagggcgaccccgagaagttctatgatgtgttcgacctcaacatcaacaacacgctgccttggattcccggcaagagcggcttcggatccaactacaagagctcgatttgcaagatctacaaagtacaggacggtgagtaatcatggctaaattcggaatcctcgtggacgcccagtggtgctcgggctgccactcctgcgagatcgcctgccagatggagcacggaatgcctgtcggccagaccggcatccaggttgtgaagatcgggccgtggcccatcggcgacgaagccgataacaactggcagttctcgtatcttcccattccgaccaagcagtgcgacacctgcgcggcgcgccggggccttggcaaagtgcccacctgcgtgcagcactgccaatcgaagtgcatcgagttcggtccgctcgacgagttgaaccagcgcctcgacgcgaagcagaagacgctgttcgtcgtggcataggttccgttcgctcacattgatcgggtgccggagtcaactccggcaccttacgaaggacaaggagatcggcgatgtatagcaagaagtactatattttctacggactgttcttttccttgatcgttgcggcgatactctgccttgcgctgacgttcgcgcagggaatcgcccatatcgacccgatattctaccttatcagctttgcgatcgcgttcgtcacctcgttcgtggtgacggcggtcatccccttggcgcgcattgcgggagccgccgccgagtactacgatgcgaaacccggcacgctcgggttccgcatcgtgcagaacatcttcttcagcacgctcatcatgttcgtgctcggcatcgtcatgacggcgttcatgacgggtgtgggcataaccgaggccgtcaatcccatgacgggtcttgtcgatccggtcaacctgttcgaccgcttcgcggcgctgtgcatccagttctggccgaccatcgtgatcgtggcgtttctgtcggatccggcggcgggcggcttggccaagctctgcgtgaagcccgaagaccgcttcgcgaaaatccccggcgctgctgccgacgaggtcgttcatgcgtaagcgcgattcgatcgacgcggcatcgggtgcgacccctgctttcgagcgggggtcgcgtcttcgacgggctggcggggcagacggggtgctggacggcgcggatgcgggatcctcggcgggcggtgcgccccccgatgcggtcgccgacgcagccggcgggccttcgcgcgacgaagagtccgacggcgggcgttcggtcagcctcgtggacgggtccaatgctaccgaggacgaggtgcaggatctgatcgatgcggtggcgggcgccacatggaacacgcgcaaccgcatcatggaagagcggtttttggctgatctcgaccgtgcgggcggggcgaaggtgcccgcattcaagcctccgggggaagcgattctgggcgagtgaccggcggtcggaaccgcttccgagcccccgctcctcggctgtcgagccgatggcgggagactgcgatcaggagcatgttttgccctgcggcatgtcgttgttcggggcttgccgcgacttggggtcgcgctgtcctgcggcgcgtcccgctctgcagcggcgccccgcttcggcagcgtgcgcgcgctgctaacttgcgtttaccagaacaacataggcgacggcgccgctcgatgagagcatgcagaaggcgaatactgcaaagagaatcgttcgcaccgaacgtgccgcgttttcgatggaggctgtcttctgctggtttctggcaatgcggtaggcgaaggtcaacagcagattgctcgcggccatgattgcggcgaaaagaaagatttgggatttgggcgcccatccgtcggggccgccggctgcgaagtggacggcgatggtgtcgggaagggcggtgaacccgcagagcgcgatgatgagcggtgcaaggcacagcacgccgagcgcgatccgctcgaccgggcttagcggcgcttgctttcgcaggggggcggtgtcgccctgcttgcagttggacatcgatgccgtttggtcgaaatccgtcggctcggttgcctccgcttgaacagaggcgttttggccttcgcgtcctttgccgtcgaaacgctttttcagatcgcattccactacggggacgattgcgatgatcccgatgagcggcagccccatgtacaggcatgctgccgcggcggatcccgcatcggttgcggtgagcccggttgctccgtcgaatgcggctaatgcgatcgccgttgcaaggcacgcaagtccgacgacggccatcatcgtgccgcctttcctgttcgcgtatgcccacgcctcgcggctctgcatcgagcgggtggtccgatatccgaacgtagggttcgggtcgaatgcggtgtagcgcatgagcgctcccaatccgatgaagagcaggtcgatgaccaaagcaccgaagagcatacgcgattcctttcttgaaacccggcatacgcgcgttgcagccacgactgccgattatacaccttggagtttcagcccatcgccgccgcatcggcattttccgttgccatgtttcaagagcagtctcatgaccgcgtctgcttcgagtgcggggttcccgtgctctttcggccgtttggcggtggatttctgcccggatcgcttgcatttgctttgtgcaacctgttactatgtccaaacgttgtttcccgaaagggaatgtgaaaggattgatgtatgccggcggttgcgaaggtcgcttccctctaaaacctcataccgcggatggccgcatggtgcagatttcgttctgcccgcacggcatccgaaccgcctccgtgaaaccagccgcgcatatgcgcaacgaaggcacgcttgacgtgctttttctatgccatctggcatgatacccctaatcgaacgatcccgttctgacggttgcgaaggcgcgtcgggcgggatttttctttggcgggaagccttgcagacaggaagaaatcaatgaacggaatattgaagcaccaggagagtaccaacaatgaacatggaaagatacgggctgaaccctttgcggttgcccgagagcgctacaggaataccagctagaatcaccgcagttcaccgcggtttgttcgagatcgtatgcgaggagggcgttggcatggctcgtcttaaaaggggagcgtaccgcgcatccgagtcgtgtcatcctaccgtcggcgatttcgtgatgatcgactgggtgaaggatggcgaaagccggattcgggaaacactgccgcgatcgacgtttttcgcgcgccgcgatccatcgtcttcaggacatgccgagcaggccgttgccgcgaacttcgattacgttttcatcatgcaggctctcgacggcgatttcaacgagcggcgcctcgagcggtatctgacgctttcatggcagtcgggcgctgtgcccgtcgtcgtgctcaccaaggctgattgcgccgaagatgtatcgacctgcatacggatcgccgagagcgttgcgttcggcgtcgatgtgcgtgccatcagcgcaaagaccgggatggggctcagcgggctcgatcgctacctcgagccgggcaagacgatcgtgctgctcgggtcttcgggcgtaggcaagtcgagtttggtgaacgcgctttcgggagatgatctcatggctgtcggtgaggttcgcgaaagcgacggacggggcaggcacaccacctcccatcggcagttgacgcttctggaaggcggagccatgctgatcgatacgcccggcatgcgcgagctgggcatgtggaacgccgacgagggtttaagccagggattttccgacgtcgaggcctatttcggcaagtgccgattcagcgattgccgccacgagggcgagccgggctgtgcgatagcggaggccatacgcgaaggcgagcttgcgtccgagcggtgggaaagctatctgaagcttaagatcgaaacgcgccttgccgatgacaaggaagggttcttgcgcgacaagcggcagtgggagaaaaacctttccaagctcgttcggcagatgaagcaagtcgaccgcgaagccatgcagaccggtcgaactccgatgcggctgggccgtttggcagagcaaggcgatcgggctttggtgggaaacgaacgggatgcggtgcgggatgggcgcccgccgcatgcgcactctgcggcgaaggccgatcgtgcggtgcggcgcggtcggcccgattaccgccatgaggcctgcatcgagagcttcacctgctcggtgtgcggaagcgtggtggtgcccgaggatgctggaagcgagcatcgcaaccattgcccgcactgcctttcgagcgtgcatgtggataaccgcccgggcgatcgcgcatctttatgccggggcgtcatggaacccatcggagtttgggtgcgcaagaacggggagtgggcgatcctccatcgctgcgcctcgtgcggcaagatcgcctcgaacaggatcgcggccgatgacaacgcgatgctgctcatgtccatcgcgaccaaaccgctggcgaaccctcccttcccgctttgggatatgggtgctgcgacggcgagcggataaacaggtgcgaaccgccgcccggtcttgtatcatagggtcgtgccgatcgggtgcgatcctatggttggcggcattcgaatcaataagaacggaaacgaagggtagggccgcatggagcagtacaagcaggagttcatcgagttcatggtggaaagcgaagtgcttaagttcggcgatttcactctgaaaagcggccgaaaatccccgtttttcatgaatgccggcgcctacgtgacgggctcgcagctccatcgcctcggccggtactacgcccgtgctatccacgattcgttcgggctggatttcgatgtggtgttcggccccgcttacaaggggattccgctgtcggttatcaccacgatggccttgaacgagctttatggcgttgaagtgcgctattgctcgaaccgcaaggaagcgaaggatcacggggatgcgggaatcctgctcggcagcgatttgcgcgacggcgatcgcgtcgtgatggtcgaagatgtgaccacgtcgggcaagtcgatcgaagagacgcatccgattctcaaatcgcaggcggacgtcgacgtcaaggggctcatggtgtcgctcaaccgcatggaggtcggcaaaggcggcaagatgagcgctctcgacgaagtgcgcgatcgttacggtttcccgacggcggcgatcgtgaccatggaagaggtgaccgagtatctgctcaacagggagtgccggggcagggttgtcatcgacgacacggtgaaggcggcgctcgatgcgtattacgaagagtacggcgtgcgctaggcacgatctcgaccaagcgaaaggagccgcagctcattgtgaactgcggctcctttgctgttttccggtggctttttctagttgttgcggcgtttcgcaatcgcgtaggctccgccagccgcgagcaggcctgctaaagcaacggctgcaaagggcagaatcgatacggcatcacccgtccgcgcgagctttgccgcgcttcccgttttgcccgaagatccatcgcctggcttttcgggatccttcgggtcggggtctgccggatcgggatccttcgggtcggggtcctcgggatcgccgggatcgaccgccttccagatggcgtgcagatccacgtcgttggcgggcatggagaacccgtcggcgggcgaatagagcgccgtttcgcttgtgggatcggtgtgccacccgatgaactcgtagccgtcgcgtgcaagggtgttcttgtccagcactgatacgggctctcccgcagcgtactgcgcgctcggatggggatcgcccgcgtcgtggccgttgccgtggtaggttacggtgtagagcacgggtgccggaggctgggccttccatacggcgtacaggtcgacatcgcgtgccggcatgttgaacgtgtcggctgcctcgtattcggcgtcggttgccagcgggtcggtgctccaaccgaggaagtcgtggtcggtgagcccgagcgtcgcctcatcggagaccgtgacctcggcgccttcgacgtagaactgggttgcgggcggattccccgcgtcgtttccgttgccgtggtatgtcactttgtatgtggttgccggtgtgccgcccgtgaagttgatgtcgtagttgttgagcggatgatggggcacgaggcccgcgatgctgatgctcgagaattcgatggaggggtagtcggcgaataccgttgcgggcggaatgtaggccgccgaggcggtgttgcggtcgaacacggtatcgggtccgatgaccatctggccccaatacggctcgttgctgtagatgccgccgccgtgcccgttgggcgcggaattgtctacgatgacgctgtcgccgctgatgaaaagcgtgacggttttgttcgcctgcccgtcgaagaagatgcccccgccgcctttctccgatccgagcgcggtgttgcgcgccaccgtaccgccgttcatggtaagcgaggtggggtttgcgggcgtcgcagccgagtactcggtgaagatgcccccgccgttttcgcctgccgtgttgtctacgacggtagcctggtcgttcatcacgaggccggctcggttcgtgaccgcgatgcctccgccgcttgaagtggtttcgttgtcatggacggagctggagtcgttcatgatcatgaggtcgttgctccaatgggctacgccgcctccccagccgcctgcggtgttgtgatggacggagctcgtgtcgtgcatggtgaattcggtcgaaatcgagtcgatgccgcctccgctgcgcgttgcggtattgtgatggaccgaactcgaatcgtacatgtcgaagtaggtgatcgatccgccgccgagatacatgcccccgccgacttcggcaaagttctcggtgatggtggcgttgtcgtacattttgagcgtggcggtggccgtgttgtagcgggaaacgccgccgccttggtcggcggtgttgttcttgatgaggctgctgccggtcatcgtgaacgaggggtcgttgcccatccagtccgagtagaggttcacgccgccgcccgattccgccgtattggcgtcggaggggtcttctccgccgatcacgcctccgttcatcacgaaggatgcgttgccgtatacacatacgcctccaccgcggatgtcggctgtgttggcgcggatcgtgccgctttccatggtgaacacggaatcgcccttgtacaccatgacgcccccgccgccggcgccggtgtcggtgttcttctcgatgagggccgagccgctcatggtaaacgagctgccgccgccgaccgtgactccggcaccgtagttcgaggtgttgctgttgcccgtgatcacgcccccggtcatggtgaaggtcgatgagccgtcgaggttgaggccgccgccgtttcgggcgttgttgttctcgactgaccccgatgacagggtgacggtgccgccggttgcgtacacgcctccgcctccgcgggtcgtatcagacttcgtcgtagtgttcgccttgatggtgccgccttcgatggaaagcgctccgcggttcacatgcacgccgccgccgaaggcgctgctcgtgcagttttggatcgtggctcccgctttcagggtaagcgtgccccgtttgccgtcgacgagcacgccgccgccgacgttgccgccgtcgagcgtgacgttttcgaggatgagggacatgtcgtagcttgagctgccgccgtcaacgtcgaagtggcgctcgttcgccgccgtttgcgtgatggtgaaggtgcttccctctttcgaggtcaacgtgatgacccgattgaagggggcgtcgatggcgctcgagacggtaaaatcgttctgcagctcgatggttcccgccgagcggatggggatgtcccacatcgcctgctgcaattcggtttcgttggtaaccaggatggcgtcggcgcgcagctccgcttcggcaccggctggctccccgtcaaaagccagcgcctcgatttcatttgcatccgatttcttatcggagggggtttcggtgcccgcatcgccgtcggcgctgccgccgggtgcttgctgttctggttggccgcctgcctcggtcggctcgtcctcgccggcggcatccgtctcgccggttgacggttcggtactcgcctcctcggtagacagagcgtccaccgggccggtcccgccagttgaagccagcgcggatccgccggaaacgccccagaatgcgagcatcgtcgcaagggctatgaggaggagcttgggaggtcgtttgatcgtcggcatgtgtctccttcgtcgtgtgcgtaccgcatgcacagcatgcgcaagcatgaaatataacatcttgcttaaataaaggaaatatatttcatatttttataaaaaaatacatcttatctgatgaaacaataaatataaagttatataataagttatacatatatgagcacagcatgcgaaagcgagattggcatcgcgtgatgctggactttttccgagcgttggccgtgcatgggccgagatccctttttccgctggcttcgggcggtcgaagtcgcctgcggaaggcctttcggcggggcggcatccgtcggttgggggcaaaaatccacgctttatcctcagcggttgcgccggtaagctgctatcatggtgacgataccagagaaggcatacgagaatttgcagaggcacaagatatggcattcgttcacctgcacaaccacaccgaatattccctgctcgacggcgcaacgcatatcaaggatatggtgcgccgtgccgcagagctcggcatgcccgccgtggccgttaccgaccacggtgtcatgagcggcgttcccgagctgtgcgatgcatgcgacgcggtcgaggctgaaacgggtgtgcgcgtcaagcccatctacgggtgcgaagtgtacttcacgacggacgaggaactgcgcaaggacaccaagccgaagctgtatcatctgctgctgctcgctaagacgaacgagggctaccacaacctcgtccgtctcgtatcggagtcgcatgtcgacaacttctactacaagccccgcacgacgttttcgatgctccaaaaatacggcaagggcatcataggatcgagcgcctgcattgcgggcatcattcccaaaatgctcgacgaccgccgtttcgacgatgcggtcgaatgggccaagaagttcgcgagttgcttcgatccgggcgatttttacatcgagctgcagaatcagggcatcgtgaccgacgccggattcacgcagaccgagctcaaccatcagcttacgaaggtcgcgcagacggcgggtctgaagaccatcgccaccaacgacttccactaccttttgcaggaagacgcccgcgcgcaggacatcatgctctgcatcggcacgggctctgcggtcaacgacacgaaccgcatgaagttcgagaacgaccagttctacatgaagaccgaagaagagatgcgcgaagccctcaaggatttccccgaggcgtgcgacaatacggtcgagctcgccgcgaagtgcgatgtcgtgctcgagcgcgattcgatcttgccgcgctttcccttgccggagggagagaccgaggagagctacttcaagaagcgcatccaggagggcctcgtcaagcgctacggcgagcccatacctcccgaagcgcaagagcgtgccgattacgaagcgggcatcatcatccagcagggtttccccgcgtacttcctcatcgtgcaggagtatatcgagtgggcgcgaagtcagggcatcggcgtcggtccgggccgcggatcggccgcaggcgcgatcgtcgcctacgccatgggaatcaccgatctcgatccgctctcgaacgggcttctgttcgaacgcttcctttcgcccgaacgtgtggagatgcccgatatcgacgtcgacttcgaagacgaacgtcgcggcgaggtgatcgagcacatcaaggaggtctacggcgaagaccacgtgtcgggcgttatcacgttcggcaagctgcaggccaaaaacgccgtgcgcgacgccgcgcgcgtgctcgactacccctacggcgtcggcgaccgtatcacgaagatgatcggcgacgagctcggcatcacgatcaccgatgcgcttgcgaagaaccccgacctcaagaaggcctacgcgaccgaagaagacgtcaaacaggtgctcgacgccgccctctccatcgaaggccacgttcgcggcgaaggcgtgcatgcgtgcgccacgatcatctgccgcgatcccatgagtgatcacgtgcccatgaagcgcgataccaagggcggcggcatcatcacgcaatatgacgggcattacacgcccgacttgggacttcttaaaatggacttcctgggcttgcgcacgctcggcgttatcagccgcgcatgccgcaacatcgagagccgcttcggcgagcacatcgtgcccgaggagatcccgatcaatgacgagaaggcgttcgagctcatgcgctcaggcaatatggacgggctcttccaggtggagggcgcactttacgtaagcctgttcgcccgccttccccccaaacgcttctccgacatcgtcgcctcgatcgcgctcaaccgtccgggtccgctcgagtcgggcatggtcgacgactacatcaaggtggcgagcggaaagacatcggtccactactacgacgaccgtctgcgtccgatcctcgaagaaacctacggcaccatggtctatcaggagcagatcatgcagatctccatggccatgagcggcttttctgccggcaaggcggataagctgcgcaaggccatgggtaagaagaagctcgatatcatgcgccagctccaggaagactggaacagcggcgcggtcgaaaacgggttctcgctcgatatcgccaagcagatctgggaagatgccgagaaattcgccaagtacgcgttcaacaagtcgcactcggccgcatacgccattctggttatgcgcacggcttacctgaaagcgtactatccgcatgacttcatggctgccgtgctttcgtcttacatgggcaactcggacaagctgatcaagtacatcgcgagctgcaaccgttcgggcattccggttctgccgcccgacatcaacgcgtcgaacctggagttcacgccgactgacgaaggcgtggtcttcggtttggcgggtgtgcgcggcgtcggcgagaaggtggccgaagaggttatccgcgaacgtgagcgcaacggcaagttcacctcgcttcacgatttcgtgaaccgaatggattcgaaggcttacaaccgcaagacgctcgaagcgctcatcaaggcgggcgcgttcgattcgacgggttacacccgcaagcagcttatgtacttcatcgaggagacgccgctgctcgagggtgcctcgaagcggcagaaggatcgcgacatggggcaggtgagcatgttcgacatgttcgccgacgatcccgattcggatttcaaggaggagatccccgcgcccgacaacgtcgagtgggacaagcgcaccaagctcgcctacgagaaggagatcctcaagatctacgtgtccgaccatcccttgcgtccgtacgaggggctcatatcgcgtatgacgaagttctcgctcggagatttggctgatcgcgagaaggacatcgcgagcgcaacgttcgtcggcatggtgtcggccgtcgtgaccaagcttacgaagcgcggcacgaagatggctacgttcacgcttgaggatacgacgggacatgtggatgccatctgcttcaagtacgatgataacgccgaggcaatccaggaagacgcgatcgtcaagataaagggcaagttcgagcacagcgaccggggcaatcagctcatcgcctacgagatcgaggccatcgagctttcggaagacgacgtcaggccttcgcacctcgagctgaagatcgcctcgtcggacttcgaccagaacgcttcgatgcgcctgaaccgcatcttgaaatcatatccgggccgcgacggggtggtgctgttcatcagccaggccgacgggcgcaagttccgcgcagagcttcccgttaccgtggatgcccgcagccagattctgcgttcggaaattcaggatctgttcggaaagccggtgtggatggcttcgtagaaaaccgctgtttcgagcagcggcgggcgcgggtttgcctgcagcgaagggttgtttcgcgccggcatttcgccctatacgcgctcctttggcgatggcggcatcacaaaatgctgacgattcggctgttccgatgtgcggagcagccgtttcttttatactgaacggatatggaaactgttatggaacatacggtggcgcttaagctcgcttacgatggggctccgttttcggggttcgcgcgacagccggggcagctcacggtgcagggatcgctcgaagaggcgctggctttgctgtgcaagcgctccgtcgagacgacctgcgcggggcgcaccgatgcgggggtgcatgcgcgcggtcaggtcgtaagcttcgacgttaccgctcgcgagttcgaggctcgacccctttccgcgctcacccgatcgctcaacgcgctcgtcgacgagcgcatcgccgtgcgtggggcgtgggaggcggatttcggcttctcggctcgattcgatgcgaaagcccgcgagtaccgatacttcatctacgaaggctccgagcgtccggtgcttgtggccgaccgcgtgtggcacctcaagcgccatctcgatatcgatgccatgaacgctggcgcggctcatctgatcggcgaacatgatttcaaaagcttctgcacggcggtctctgccgaaggaaaacccacctgcagaaacgtttccgagatatcgatcggccgcgaggaccttctcggagagacggtcgtcgtcgtaagggtggtcggcaatgcgtttctccactccatggtgcgcacgatcgtcggcacgctcgtcgctgttggctcgggccgccgtgaccccctgtgggtgaaagaggtgctcgaagcacgcgaccgatgcgcggcgggcgagaatgcgcctgccggcggtctggttttttggcatgtcgattacggcgacgcgtcgttggaatccgtgcgggaagagggtagttgtgtttaggaaaagcgccgaacagcagattgtgcgggaggccgacagaatcgtatccatgaaagaggatatcgacgccatgtcgtggaaccgtgtcattgagatagcgaagcttttgcaggccgagcataccgaagagcagcgggaggagtgggcgcgcgagcttctatccattgcgcgtaccaattcatgggtgcttgataagttcggcgttgccgaaaagggaatgaccggccaggttatcccttccggcatagaggtccagcacaacgaccgctatctgagcgaaacctctgcagccgagatcccttcggcgggggagaagcccgaaacatcggaggacgccctcccaacggccgagtcgggttcgggcgaccaagccgcgcaagacggggtttcgcacgagcatacggctgccgaagaggaacttcggtcgctcgaggcgctctacgaccagctcgtttcccgcgatgcgggggcgccggccgaggagcgcgcgagtgccgaggagccgatcgctgcggccgaatcggaatcggtggacgaggcggatcccgatgatgcgccgcatgccgagaagcagcaggatccggtcggacggcttcccgtcgtagacgacagggattcggcgcaagatcttgatgctcgggcaccctatatcgagaccaaaggcgttctcaggaagaagcgccgcgcggaaaagcgggcgcgccgcgagaagcgcgatgcggatgtgttcagcattccgactgccgctcccgcccataactccgcgcttgatttcgagcagatcgagacccctgatttcggtcagaacgcgatgagcctcgaagaggcgaaggctgctgcgcggctctcagagccgaaggcgtgcgaacctgcatgcaatctcgatgccgagcctgcgtgcaagcccgaagagaagccgatgggcaagcatgcagcccgcccagcgcatggaagggcgcttgagcccgagcgggtgccgtcgcttgaatcggaaacagagcggtcttcggcggtgtcgctgcgcgaatcggaagcagaacgaccttcgacggcgccgtcacctaagcctgaagcggcgcagtcttcggcttccgaaccgtcgcccgcccagacggccgagcagccgcgaggagaccttgcccggttcaagcacctgtatgcgaacaaaaggggaagcctgtgcttgtacgaggatgcggacggtcatcttgtagccgtcgatccttcccgatttgcatagacatagtcaaataattgctataatcttttattatccttgtcggctccaaagctgacaaggtgtcggtgcgcggacgcgaggagagttcatgggcggttgttcaacaggtggggcgaaacgacgcaatttcaaggatgcgggaagggtatgtccgatcgactaccgcctcgattcggatctgttccgagcagagcctgctttttcctgcgatacgctctacgtcgtcggaggcttgtacggaaacccctttgccctcgatgccctcgacgatctcatcgcttccgaagacggcgacgtgagggctgttttgaacggcgacgtgcattggttcgataagacggccgagaacttcgaagccatcgagcagcatgccgcccggtacgtgccgcttgcgggcaacgtcgaagccgagctgcgccgcgagaccgatatcggcgtgggttgcggctgctcttatcccgattgcacatccgatgccgacgtcagccgttcgaatcgcattcacaaaatgctttcgacggcgttgttttcgcatcccgagcttcgcgagctgctgcaaggcaggccggttgccttgaccgcttcggtcgggtcttgcgttgtgggcgtaacccatggcgatgagaagcttatcggggggtgggattgctcgcgcgaatcgcttcaggatccccttaggcaggaagagctttcgcactggatgcgcgaaaccgggatcgatgtgtttgcaacgacgcatacctgttcgcctgcggcgatgatgctggtcgacggagcggtcatcaacaacggtgctgcgggcctgccgaatttctccggccaggatttcggcatcgtcacgcgcatttccacaacgcccgccaaagaagcgctgtttggcatcgagaggaagggcgtccatatcgaagcggtgcccctcaggtacgaccaggcggcctatgtcgagtggttcgatgcgctgtggccacccgcaagtccggcggccatttcgtatcgtgaccgcatcgtcggggggccgaacgactacatcgaagatgcgttgctcgggggcttttctccccgtgctgcgtttcgcgaagaggccgttcggccccgcgttcgggcgacggctggagatgtggagctcgcgcttgctcgcctcatgtacttcgaggatatgctggaagccgagcacctgagaaccgagccgcatccgacgacgcttcaggcgaacgtcgggaagctgtgcaacctcgcctgcgcgcattgccatgtcgaggcgggtccgaacagaacggagctgatgagccgcgagtgcatggctgcgatcctctccgtgatggagacccgcggcatcgaaacgcttgacatcaccggcggtgcccccgagatgaatcctgatttcgaatggttcatcgacgaggctgcccgccgtgtgggccatgtcatggtgcgcagcaacctggttgttctgctcgagccgaagtgcgagcacctgatcgaccggtatgctgatctcggcatcgaggttgtcgcatcgcttccgaacgtcaacgccgcccaggtcgagaagcagcgcggcgcgcatgcgttttcggggtcgctcgaggttcttcggcgcctcaacgcaaaaggatacggcaatggcagcggcttggtgctcgatttggttttcaatccgcagtggcccgtgctgcccccgaggcaagacgagcttgagcaggcgtacaagcgcaggctctccgaagatttcggcattgtattcgataatctgtttgccgttgcgaacaatccgatcgggcgctacggagcccatcttctggcgacggatcgtctcgacgattatctggagctgctcatggacgcgttcaatcccgatgcctgcggagacatgatgtgccgacaccaggtttcggttggctacgacggccgtatctacgactgcgatttcaaccaagcggtcggcctcgttcagaaacgtgagggaagggaccttaccatcttcgactatgctgccgacgacgatctggcgcttgaacgtgcaatagcgtttggaaaccattgctacgcatgcgctgcggggttcggttcgagctgcggggggacgctcgtccagcaataggctcgatgcgaagcctttcttccgaaaatatataatcacctattggcatatagttattattagatataatccaatagtcgatatggacaacggtgattggattttgcgattgggatcgatcggctgatttccagaatgcaatgaccgatgtccatcgacagtacctgcaatctgaaaggagcgcatcctgccatggattcatcaactggaattttcttttggggttttctcgtcgtgtacggtatcgtcatgtccctgctttcgccgaaaaccgtgagtcttggcggcttcttcaagggcgaggacaaacatgggcgcgctgccaatccgtggatgatcaccgcttccattttcatcgcatggattttcgcgaagtcggttaccaacgcggccaatatgggcgctcagttcggcatcgtcggcggcatcggctacgcgatgtattggctgtgcatccctttgacggggttcgccctgtaccgcctgcgccgcaagttcggtgcgacgggaaccgtgagctttctgaccaagcactacggaatagctgctgcgttttgcttctcggcagccatcctcgttcgccttttcaacgaggtctggtcgaacacctcggtcgtcggcgcttactacggcgactcaggatcggctccgttcatcatcgcggccttgctgttcaccgccatcacggtgggatactgctgctggggcggcatgcgcggctccatcatcaccgacatcgcccaagcagcgcttttcgccgtcctgctcatcgtggtcctggtgtgggtcgttccgcaggataatccggttgattacgtgacatcgggcgtgtggtcgctcgagggaggcgtcgatttcataatcggcgcgggtttgcagtgcctctcgtacggcttccacgatgcggtgctgaccgatcgcggtttcatctgcgaagagaagaagatgttgaaatcgttcgtcgtcgccggtcttctggggttcgcagcgatcgtgctcttctcgctgatcggcgttcacgcctacataaacggcatgagcattgcgggctcgagcgctccggtggtggtggcgcagagccttggcttggtggcgttcttcctgatggccgtcatcatgatagccacggcgggatcgacgctcgattcgacgttcagctcgcttgcgaagctgaccgcacgcgatcttccgggcatcctgagcatcaccccaaagatgaacccccgcatcatcggcatcatcttcatgataatcttcggcatagtgggcaacctgcccatgatcatgggtgccgatatcatcgcggcaactaccatttcgggaacaatgattatggggctcgggccgatttttctcatgcacggcgtggtcaagcccacgaagatcgggttccaactggctttctggattggcatggcgctcggcatcgtggatacggttgctcccgcttcgctcggcttcatgaacataggggcgggcacgtatgcgaattttctcggtgtgaacctatggggtgcgatcatctgctgggcggcttacatcgttcccggtctgatatcgcaggctaacgacaagaagaacggcatcgagccaacgtggagagggcgttccaaggaggagatcgcccgacttgacgccgaacgcgccaaaggcggctgcggcgaggttctgcccgatgccgacgaactcgctccgacaggggcgtagggcgtgccccaaaccttgattcaggcaaaatctaacaggattcaactggaaacctgacaggattcgcccgtgaatctaacggaaaccgactagcaaccttacacggttcgagcacgaaaattactgcgcgtaaattctcgaaattatgcgttgatttgggtttatgatgacggcatgccgctttatctcagccacagatccgcattggaatattggcgatcctatccgacggatgccgcctgccctcgttttgcccgcgtaaaagagatccggcggctttccagggccttcgacgcaaagaagaccctggattcccttgcaggcgataccgcttcgaaggggcttagccgtccggcccatattctcgttcccgataagaaatcgcgatgccaatccgggcatgtcgtctcccatgtgtgcagagcccccgttcctccccgttcgcttgttccgatttcggaagatgcctattcaagcacgccagagctatgcttcgttcatatggctgattcgctgaccttttcgaggctggtttgccttggtttcgagctatgcggcagctattcttcgaacgccgccaatccgaaggggttcgtcggccgcattcccctttcgagtgcatcgagaatcgcgacgtaccccgatgatgccggtggcatgcgggggatccgcgggcattccgttgcgtacggctcttgctctgatctgtctgtggctgatgcatcgctgcgcttgattttcgtgcacgcaatctgtccgcaggtcttcgacgcgagttcgtcccttgcgaagcggtcggcttttcggtgcgagctcgtctcttacgacaccgcgggcttctcgggcaccgtcttgtcgacgaagtagatcttgtaccacatgaggaacatgtagatgatccatatcttgcgggtgttgtcggcgaggccggcgcggtggtcgtcgagcaggcgcatgagcttgccggtgtcgaagaatcgctcggcctgctcgctcgtgaaccacgatttcacctgctcgtagtacttatcctgcttgagccacgacttcacgggcacgggaaacccgagcttctccttttgcgcccaatcgcgcgggatggcgcgcatggcggcctcgcgcagcgtgatcttggtttgctcggaatcggccttgagcggcgtggggatcgtgcgcgagacgtcgaacacttctttgtcgagaaacggcacgcggctttcaagcgagtgggccatcgacatcttgtcggttttcagcagaatgtctcctacaagccagaagtacagatcgacgtactgcatgcgcgtcgtctcgtcgaggcctgcgacctcggcgtagacgggcgcagtgagttcttgcggggtggggccggcaacggggtgcttgagcaggtcggcgcgctcggcggcggagaacgctacgccgttcgcattggtgtagtaccaatcctcggccgtctcggaggcgcgttcgaggtagttcgcgccgcggatgccgagcgtgcgcgcgatgtgcgaggcgccgcgcaaaagcggcttcgggcaccaggagagcttctcgtttgcaaacggaacctggtagatgcggtatcctccgaagaactcgtcggcgccttcgccagagagcacggccttcaccttcttggccgcctcctgatcgacgaagtagagagcgacggcgctcgggtcggcggacggctcgtccatgtgccactgcacgcgctcgagcacgtcccagaattccgcttcggtgatggttttcgaattattctcgatttcgagctggtcggccagttcgcgcgcccacgcgatctcgtccttctcgccttcgtattcggcgaatcctacggtgaacgttttgatggccgggttctcttcggcaaggcatgcggccatgtagctcgaatcgatgcccgaggagagaaacgaccccacttcgacgtcggcgacgttgtggtagcgtaccgaatcgtgcatcgccgcgtcgatggcctcgaccgtgtcctcgcggctgcgggtttcgtcgaagtcgtagcggggtatccagtagcgctcgtcctcgatcgatccgtcggcgcgcacggtcaggcagtgggcgggcgcgagtttgaagatgcccttgaaaaaggtttcggggagagccgagaactggaagcacaggtactgctcgagcgcttcttcgttgagttcgcgctcgtaggcaggatgttcgaggatgcacttgatttcggaggcaaagatgaactgcgggccgcgggcgccgtccgcaacggtgtagtagaacggtttgatgccgaagaagtcgcgcgcgcagaagagctcctgcttctcggcatcccagattgcgaatgcgaacatgccgcgtactttttcgagtagatcccgtccccaggcgatgtatgagacgagcagcacttcggtgtcggagttcgtttcgaactcccagccttgtgtgcgcagctcggcctgcagatcctggtagttgtatatttcgccgttgaacacgatggcgaatcggccgcgggtgtaggtttcggcctcttcgacgaccggcgaggtggtcgcggcgtccttgtcggcgcttgcgcgcaccatgggctggtttccgttttcgagatcgataagcgaaaggcggcggtgtccgagcgctatgccgcgatcgagatactggccttcgccgtcggggccgcgatgggccatgatgtcgcacattgccttcagggtgaaagcatcgctttcgtcggcgccggtaaagccgcagatgccgcacatgtcgtttgtccctcgcaatcgaacggaatcggaatttcagcaactacccatcttagtggaaccatccccgtttgccgagcgatccaaccaaaagcgcacagcagtgcttgtaaacgttgggctttattgcgagcgaggcttgtcggggcgctcttgtttctgcgaatgcggagataggctcttgcgcttcgcaagccaactgacggttgttgaaaatcaaccgtcagttcgtcgacgagcgaacgggttcttcgtaaggttgtctcagaaaatgatgcgtgattgcatcgatcgatcaaaggagttggtatgaaagagttgcatgggaaaggcctttcgaggcgcggatttcttactggggctgccgttgctggggctgcggcggcgttaagcggctttgccggctgtgcgccgagcgggacgccaacgggtgcggcggagtcggtttccgctggcagcgcggaatcgcctgctggtcagccctcgtttatggttgcgccgaatgctgttgccgatggcgatatcgttgaaaccgtagaaactgaggtattggtgatcggcgcgggctactcggggcttgcttccgccttgtcggctgcggaaaacgggctgagcgtagttgttgccgaaaaaaccgcacaggcgaatggtcgcggtgcgggtacgggggtaatcaactcgtcgtatgccgtaagccaaggggccgaagtgaccgacaaggcctctgcggcgtttcgctggatgcagacttgtggcaatcgcgcaaacgaatccctcgtcagcctgtttttcgaagagtcgggcaaagccatggattggctgcttgaaaaggccgagtcctacaacgttaaagtcgatttatgggatgggtattcgcgaaacccgctgctgcccgacgagcctggctaccatatgctatcggcggatgccggtgctgccggcgtggccgattttgatcagaatgcatttttcacggtggagcttttgtatcacctggtgcaggatgaaggcgttcagtttatgtttgaatcgcctgcaacgcagctcgtgaaagagggcgacaaagtggtcggtgcgattctcgataccgctgacggattcaagaaggtgctcgcctcgaaaggcgttgtgcttgcgacgggcgatatcgcgggagacgaggagatggttgactactattgtcctgttgcaaagaaagcccaggctatttatacgcccgtaggagtaaacaccggcgatgggcataagatggctctttgggccggcgccgagatgcaggatgccccgttccctcccatgcttcacccgcagcgttattgcgacaagtcgtcgaatcagcttcaggggccgtttatgtttgtcaatcaagggggcgagcgattcttcaacgaaggaacatgggtccagccgaaatcgctgcagatcatgcagaataccgatgatgggatcgcctataccgtgttcgattcgaactggcagagagatctgctcgacagcttgccccacggcggcggtatgttttgggatagcttccgttatctggggacatcgagttacgaggataccatcgaatactacgagaactcgctgcaggagtgcctcgaaatgggaacggctttccaggccgatacgatcgaggagcttgcggagcagatcggtgctcctgtcgacgcgttgaaggcgagcgtcgatcgttacaacgatctgtgcgcagccggggaggacgtggatttcaacaaagatgcccagttcctttatccggtgatcgagccgcctttctattcgactaaggtgggcgcatgcttgctcaccatcgtgggcggcgtgaaggttgacaggaaccttcagtgcctcaacagcgaaaaccagccgatcgaggggttgtacgcggtcggcaacgtgtcgggtagcgtgtatgccgtcgactatccgatcaacgtgcctggcaattctcatggccggtgcctgacgtggggctaccatgttgggcgcgtattggcggaaattgcctaaatcgcactctcgctcagatggtttaggggctgccgcgccaacgggcacggcagccgcgatgctatgcgaaaacgcacgagcgaagcctttggctgccgttggcggcgcggtcttttcagttaattcatcctccctgattcatcgcgcgggcgcagaaggacacgaacgctctttcgcgagcggagagcgcccgtcctttcttgtaggaaagtccgaatcgccatggcagttcgtcgattggccttgcggttatcgacgaatcgcccccaagcagctcgaccttatgacgtacggttagagagagccccttgttcgtcgaggcgaggtggtacagcaaatccatctcgccggaaacgatgcttttgccaagcgtgatgtttttttcggaaagcagcttttgcagttcgttatgacccttgtattcgggtccgacggaatgaaggcttcgtccctcaagatcttcgacagacacggagctctttttagccaaagggtcgtttgccgacatccagaggaagtggctgtccctgtaaagctcgatggtttcaaattcgctgccatacggccaaagcgtgaaggcgagatcgtaaagcccctcattgagccgctcgtcgcacaggtagtcggggatatcttcgcgctcgatcaccacattgggatattcgttttcgaaatcctcgaagatggttagcggcgcagctccgacgatcccgatacatgcgccgatgcggatgatgcccgagtgggagcgtcgaatcgatgcgaggctcatctgcagatcgcgcatcgaacggcgatgttcgatggcgtactcgtagagcctctctccgtattcggtgggaacttgggctcctgtcgaattgtcgaacagcggaacttcgagttccttttcgagtgaccgaatcgacttgacgaggccttggggggatattggaatcagctttgctgcttgggagaagttgcgtgcctcgtatgcgcgaatgaagtattcaagagttttgccgtccatccccaacccccgaaagccgtttatatgtgcagttaagttagcatatcccctttttgctgtctagacgattcggctgatgtgcggcttcgagtgctgggctcagggcgtgctcggcctagctcgcaaccgttgcctggaaaaggcgccttcgccgcatccttctcgcatgttcaacggtgtttctatactataattatcgcgtttgtttcgcaggtcaccgcattttacctggtgcgttggccgagtgcgatgggtgccgcatggttccggcttcgcgaaaaaggccgaacgggaaccatgcgatgcccagggatccgcatcggttgcggcgtaagggcgccgctgacacaggaggagttatggcaacaacggataagcccgcccgttccgcgtggtcgggcaaatgggcgttcatccttgctgcggctgcatcggccgtcggcttggggaacatgtggcgtttcccctatctggctgcgaagtacggcgggggaacgttcctgttcacctacttggtgctcgtgttcaccttcggcgtttcgctgctactgcttgaaacggcgctcggtcgcaaaaccgggcaatccgccatcggcgcattcaaggcgttcggcaagaagtacgcgttcatcggaatcctcacgtctgccattccgttcatcatcgttccgtattactgcatcatcggcggatgggtgacgaagtacacggcgtcgtacttgacgatcggccctggagcgctcgccgatgggggcggcttcttcagcgggttcatcacaagcaacaccgagagctatctgtggatgctcatcttcatggccatcaccttcatcatcgtggccctcggcgtgaaaggcggcatcgagaaggcgaacctcgtcatgatgcccgcgctcatcgtcatggcaatcggcatcgccatctacaccatcacgatgccgggggcgctcgacggcgtcgcgtactacctcatgcccgatttcagcaagttttcgcccgagctcgtcatcggtgcgctggggcagatgttctacagcctctcgcttgccatgggcatcatgatcacgtacggatcctatctcaacaagaaggatagcctgacccaaagcgtgacgcgcatcggaggattcgaccttggcgtgtccttcctcgccggacttatgatcgtgccggcggcgttcgtcgccatgggttcgggcgatgcggtggcttcgcaggccggcccctcgcttatgttcatcacgcttccgagcgtgttcaacgatatgggcggtgcggcgtcgatcgtcggcttcctgttcttcctgctcgtgctgttcgcagccttgacgagcgccatatccttgaccgagacgtgcgtgtctatcatcgccgacggcgcgggctggtcgcgcaagcgctcgctcatcacggtgatggtcttcatcgtggccgcgggcatgctcatcaatgcgggatacaacgcgctttcgttcatcgagccgctcggtcccggttcgtcgatgctcgatttcttcgacttcatctccaactcggtcatgatgccgattgccgcgctgctcacctgcgtgttcgtcgggtggatcatcaagccgaaggtgatcgtcgacgaggtgaagcagtcgagtcccttcaggttcgaaaaagcttggactgtcatgatcaaatacgtcgccccggtgctcgtgaccgtgattctggtcgcttacgttgcggcgcagttcgggttgttcagcatgtagccaagctgcgtattgcgtggtttgagtgcggtgctccgcctgggtttcgcactgtttttttgcaaaggatggaacaaggaccgccgatcggcggtccttgtgcgtatcggtcggtcttcgtcgtttttctgcgagcatttgcaggataattccttatccgaaaggcgctgtgcatgccggccccttttgtttctttgctaaaccgtgttttacgatgcgcctgcgctacttgtttattttcgcaaaacccatcttgtcgagtagatgggatatcatctcgctttcccaagagtatttctccaccagcgcgtttacggaaatgatcatggcgctcatttcgtcatccgtaagataccttctcaaatacgcgagcaaatgcacatagtcggtgcctcttctctttccaaccttggcgcagtgaagccgctcgtcgtgtgcgcagatgttcctgaacttcacaatggcatcgagcccgatgcgcatctccgatgcttcgaagaatccttgcttgcctcccgtgtgcccggtcgcatcgacaatcctcttgcatacggcgatctgctcgctcggtttcatgagattgaagaaatgctcgacatttccgaaggtgagatcgttcgccaatacccatagaggcacgttgtcgtggttttgcctgtagtgctctacgaattccctgctgtttccgttcgccttcctgaacagctctccgtgaagcttggccaggttgtagcgatagcctttgaggccgaatcgtttgtactcatcctcgctcgcgtagttcgactgatcgagatatgcgtccggttcacgatgcgcctccgagaaagtgtaagagcagacagtgcggacaagggcttcgaccctcaaaaggtagtggaacgttagctcgcgaagatctctatcgaagaggaatagggagtacagatcggaaaacttcgtttcggccttgtacctgtcgtcaccgactttctcagtagcgtcgatgtctaaaaaaggtgctttgtagccgttgacgatcgagtaatagccttccctcatgaggatgctggcggtcgcatcgtccgtggctacgccacgcctgttaagaagtgatatctgttcctcgattgtcttgaacggcttgtccagcttctcctcctgatgagatgagaagacggctacctgatatggcagccgtcttcaagtgggcgcgggccccgtaagatcaccgcgccataaccactgccttaaatctaagctcaaaaacgctatctgtcaatcacgtattattggaataacctaacatctttgtagtcggatgcaccggaattatacttccctacagattttcggcacttgcaaagcctctagcgatgcgcgggagtttgcttcttcgcgattctccccatggtctgcttgttattcgacgtgccttttgcatgcaagctgatcggttttccatatcctgcgaatgttctaagttgccgtttatctggacttattgacatgcctgttgatataaccgcagttcgcaggcgtgctattttgccgatcgttatctctgttaatatttcgataataattcaataaggaaaaatgcagatgatcggcatggaggttctgtgacgaggatcttagactaacagaggctgtaaaacctatagaggagagaagttcccatcgggaactccgaaagggggaagtatggttcaggaagccactgggtcgacgtttcgtttgcccggaatcagccgccgttcgtttctcgcgtggtcgggtctgttgggagcaggtgttgccctgacaggatgctcgcctcacgttgaagacgagaaagccagcacggaggaaccggccaaagcgttcgagtacgacaccgtcacgtggtcaggatgccatgtgaactgcggaagccgttgcccgctcaagatctacgtgaaggatggcaccgtcgttcgcgtcggcaacgacaacgatggcaccgacgatttcgagccgggcggcatctaccagatgcgctcgtgcgtgcgcggtcgcaccaaccgtcagcgcatatacaacgatacgcgcgtccagaagccgctcaagcgagcggaggggaccaagcgcggcgaaggcgtgtacgacgagatctcgtgggaagaggcgattcagacgatcgccgacaccatgaaggagatcaaggacgagtacggcaacgatgcgttctacatccagtacggcacgggccagctcggcggatcggttgccaaatcctggcatcccgacaacaccgcgtttgcccgcctcatgaacctgtggggtggctacctgcgccattactgcgattattcgaccggccagatcaactgggagctgccgctgttcaacggcgatgcgtactccaacaacgaagtcaccgatctcgtgaactccaagaacatcgttctgttcggcaacaaccccgccaacacgcgcatgagcggctcggccatgcagtacctgatcacccaggtgcgcctgcagaatcctgaggccaagatcgtggtcgtcgatccccacctgtccgataccgccgtcggcgttgcgaatcaatgggtgcccatccatcccggtaccgatatggcgcttgttgcgggtatgatccattacctgcacaccagcggcaagctcgatgaggaattcatccgcagcaagttcgtcggattctacagcgacacgttcgtcgaggatgtcaagcaggccgagccgaaggacaccacgtttatgggcttcgataaagacggcgcgctcgagatcaccgaggacatgtcttacgaggcctaccttatgggaaccggcgcctatgcgggctcgggagagaagactcctgagtgggcggcggccatcacaggcgtttccgccgacaccattcgcgagcttgccgagctgttcgtcgacgggcctaccgcgacgatccagggctggggccctcagcgccacagcaacggcggcaacaacgcgcgcgccatcgccatgatcgccacgctgacgggcaacgtcggcatttccggcggcggcaccggggctcgcgaaggcacgggcggtgtgccctacaaggttgctaccgcgatcccgaccttccccgaaaagaacggcgtcgacgtatgcgtgtcgttcttcgattggtaccaggctatcgaagattaccagtccatgaacgacgccacgtggggagtgcgctacatcgacgagaccggcaccacctcctacgccgagacgccgggcgagatcacgctcaaggctcccatcaagttcatttggaattacgcctccaacgtcatgatgggccagcatgccgatatcaacgagagcctgcgcatctacaaccttcccgacgagaaggattcgggcgtgcgcatgatcgtgaccgtcgactgctaccttacgccgacggccctcatctccgatatcatccttccgggcaccaccgctttcgaggaagacgacatcatcacgggcgggtcggcttggacgggcttcgtgtgctgtgaaaccgctgcgatcgatccgctgttcgaagcgaagccggtctacgagatctgcacgctcatcgccgacaagctcggcatcaaagacgagttcaccgagggcaagagccagctcgattgggtgcagtggtgctacgagcagggcatagaggcgggcgaagaccttccgggcaccttcgaggagttccgcgagcagggtctgttcaagaagaccgacgaccacactccggccatcgccaaccccgaaaagatcggcacgccttcgggcaagtacgaagtgttctccaagcaggcgtacaacctttcccagcagtgggatcttacctgcggcggatacgtgcccgacgacggccgcgaccagatcaccggcctgcctgtctactacaacaacgtcgagggcttcggcgacgaggcgacgaaggtggaataccccttccagctcatcggccaccacaccaagacccgcacgcactcttcgtacggcaacgtcgaatggctgaaatcggttgctccccagcaatgctggatcaacgatcaggacgctgcggcgcttggagttgaaaacggcgaagacgtcgttgtgtcgaccgagcgcggccgcacgcagctctctgcgaaggtgactccgcgtatcatgcccggcgtcgtatcgattccccagggagcttggtacgatcccgagacgcgcgatcccgaaacgatcggcagcaaggacgtgctcgacaagggcggctgcatttcggtgcttacgtccatgaggccgacgcccatctcgaagggcaacggagtccattccaatctgtgcaagatcgagaaggcgtaagggggcgtaaacgatggaacagtacggattttatgtcaacaccgatatctgcaccggctgcaaggcgtgcatgaccgcttgcttcgatcgcaacgatctcgaggtaccgcagaaattccgcaaggtttgggaattcggcggcggcgaatgggccaagggcgacgacggggcttacacctcgacggcgttcacttactatacctcgcttacctgcaaccactgcgacaacccggcgtgcgtttcgaactgcccgaccggagccatgcagaaggacaccgagacgggcatcgtggataacgacaaggaggtgtgcatcggctgcatgacgtgcgagcaggtatgcccgtacaatcatcccgtgcagcttgccgacggtctttcccacaagtgcgtgctctgcagcgatgagaatgccgagggtgtgcccgatccggtttgcgccaaggcgtgcccggtgcgtgcgctcgagttcggcaagatcgacgagttgcgtgagaagtacggcgacaactccgagatcggcacgctcgaggattcgacggcggccaacgtcgtcatcgggttgcaccgcgatgcgtctaaaggcggcgagatcctgaatccgatcgagatcagccactaaaccatgaaagccgcccggatgccaaaccgggcggcggcgcgataccgaacggcggattctgctctcaccctggaatccgccgtttcgcctatcgtacgatctgcgttgccccatcggctccgtttacaaggaggaacatctatggaaaccgaaccaatactggcgcatgctaccgtgcaggcgtatcgcgtgctttgcgaattctgctctgcgctgctggttgaaagcccctccgaagaactgatcgatcagctgatcgatcagcgcagccttcttctcgaagaaccgttcgcatcggttgcgcccgatgcgtcatctgcgctgtacggcgtgctcgagcgggtcgatgctcagggcaaggacgacttcgtcatcgaagtgaagcgcgattacacctacctgttctacatggtcggggcgagccgcacctctccgttcgaatcggtttaccgcaccgacgatcgaacgatgttcggccccacgacgctgcaggtccgcgaatcatatcatgcgtggggagtcgaggttccccagttgggaaacaagcccgacgaccatatcggttacgagttcgcgtttctgacgcatgtgctgggttgcgctgccgacgcgcttgccgcagaagacgatggcgcggcagacgaagccggccgggacgttcgggcggttggggaaacggatgccgagaaagaggcgtttcgcgcaagcggcgccgtgcgcagcttcctttccgaccatctgctcgtgtttgccccaacgtatttcgccaacatgaaaacccgtgcgcatgagccgttctaccgcgctgttgccgatatatcgctttcgacccttctctcgctggcgcaggcgctcggcgcgaagccaaccgacgagatcgatgaagccgcctatcgccttgcggagtaagccgtataatggcacggggtccgcatggaggaacccttgatcgcgcggacggggcggtgtgcattggcggaacgaaaaagcaatatcagcatgaagacgaagatcatcggcatgctttcggccgtgctcgctcttctgctcgtcgtcgatatcgtatggacgtacgaatcgcagaaggaggcgaccgaggcggttctgctcgaggagtcgcgtgtgctcgtccaggagatggacgcggtctggaatttcatctccatcaatcaagacgtcatcaactacaccttcgatggcgaatacgagtacaagcggcttcactgcgcgatcgcgggcaaatcggtcgcagcgttcttctctcagaattccgactacgagatccgcttcacgaacatcgagccgcgcaatcgccacaacagccccgattcctacgagaagcatgcgcttgagctgttcgctgacggttcgggtaccgagtattactacggattcgaagattcggacgagggatcggtgtttcgctacgtatcggccatgaaggtgaccgaacattgcgttgaatgccacggaacgcctgccggcgagatcgatcccaccggatacgcgaaggaaggctgggagatcggagatctggcgggtgcggtgagcgtcaccgtccccaccgacgtgtacttcgagaacatgagcaccgccgtagtgaacaacgtgctgttcttcgtcgccatcatgctgtgcatggcgatcatcatctacgtggtgctgacccgtctcattaccaatccgctcgagcggttgcagcgatccttcgcgaagatgtccgacggatcgccgagcgatccgcccgatgcggctgaggagatgaatccgatctataccacgagggagatcgacgagctgttcgatcggttcgacaccatggccaagagcctctcgtcgctttacggcaacctcgaatcggaagtggatgagcggacggttcagctttccgaggcgaacgaggagctcgaacgccagaggcggcatgtcgaagaggtcaacgacaagctcaagcgcgagaaccagtacaaatccgacttcctcgccatcgtaagccacgagctgcgcacgccgctcacctccatcctcgcgttcaccgatctcatggccgacaacgtgtcgggcgagaacgcgcttgtgcgcaagcaactcgaggagatcgacaaaaacggccgcattctgcttgagatggtcgacaacgtgctcgagaccgcgcggattcaggctggctccgagaaactcaacctcgaactcgtcgatatcaacgacgtggtcggcatggtggaggcttcaagcgaatcgcttgcggccaagaagagcatcgcgtttgcgacgaacgttgcatccaatgtgccgttgatctcgtcggattgggaaaaggtgcggcgtattctcgtcaacctggtaagcaatgcgataaaattcactccggagggcggctcggtcgaggttcgggtccgctatgacgagagcggagggatcgtcgtcatcgaggtgatcgatgacgggatcggcataccggctgacaagcaggatctgatcttcgagagattcgctcaggagaacatgtcgacggtacggcgctacggcggcagcggtctcggcctttccttggtgaaagatctggcggctatgctcggcggcacggtatcggtagaaagcgagctggggcagggaagcacgttttgcgtggtgtttccggccgagcggcctgcggagggaagcgatgactaagataatgctgatcgacgacgatgagagccttcaggttctcatcggccagattgccgagcgcgacggctacgagtactgctgcgccgccaacggctccgaaggtttgacgatgctgcgagccgagcggcctgatttcttgatcctcgacgtgatgcttcccgatacgaacggctacgatatctgcgagatcatccgaagcgagggcaggaagataccgatcatgtttttgtcggcgaagggggatatcgtcgataagagcatcggctttaaaatgggtgccgacgactatctcgtcaaaccgttccagcctgaggagctgtcgctgagggtgaaggcccatctgcggcgcaaggggaatgcgaacgatgtcgaccgcgctcccgctctcaagaagcacaaagcctaccaggtgggagatctcgagcttttgttcgggcgctacgaggttcgcctggggggaaggctcgtttccctgtcttcgcgcgagttcgagcttctggagcttcttgcatcggacccgggcaacgtgttcacgcgcgaccagatcatggagcacgtttggggcgataaggacgcgaccgatccgaacagcgtgacggtgttcgtgcgcaagatcagggagaagatcgaagaagacccttcgaagccgcgctacctcatcaccgtatggcgcgtgggctacaagattgccgaccgtgcgctgttcgagagcagcatggaggcttgatgccgacgcgccgtattacggcgacgttacggtcgggttgcgatggcgccgattcgggcgattctgtcgtatgatgtcagcgaagctgcggagtccgacccgcggcttctttttcgtgcgggcgcaacctgtgttttgccgctgctcgcaactcgaattccgccgcttgttcgcctaccggcccgaggcgttggaatcgcgctttagctcgggattcaaatcctctataatggcttcttgctatcgtagaaggagcccgttcaatgtcgctatccatcggaatcgtcggcttgcccaacgtgggcaaatcgacgctgttcaccgcgcttaccaataaaggcggccttgccgccaactacccgttcgccacgatcgagcccaacgtgggtgtggtaccggttcccgacgcgcgtcttgacgcgctggccaagatcgacaacccggcgcgcctggtgcccgcaacggtggagttcgtggatatcgccgggcttgtggcgggggcttcgcagggcgaggggcttggcaaccaattccttgccaatatccgcgaaacggatgccatctgcgaggtagtgcgctttttcagcgatcccgacgtcgtgcatgtggctggcagggtcgatccgcaaagcgatgtcgaaaccatcaagaccgagcttatcctcgctgacatggcgacggttgaaaaagcgctgccgcggctcgagaaagaggcgaagcgcgataaggcggccgccttcaagctggaaaccgccaagaaggtgcttgcggggcttgatgacgggcaccgcgtagcgcgcatggacctgaccgacgacgaacgtgcgagcatctacgatctgcacctgctcaccgtaaagcccatgctctacatcgccaatgtcgacgaggatcagcttgcagccgatcttcccgaaatcgacggatgcacgcccgtgcccatctgcgcgaaggtggaggccgatctcgccgaactcgatgccgaggaggcaaaggagtacctggaggccatggggcttgaggaaagcgggctggcgaagctcgtgcgcgaggcgtatcgcctgctcgggctgcaatcgttcttcacgagcggcgagaccgagtcgcgcgcttggaccattcccatcggcgcaaaggcgccgcaggcggcgggtgtgatccataccgatttcgaacgcggcttcatcaaggcggaaaccgcgagcttcggcgattacgtggagtacgggggagaagcgggctgccgggcggtcggcaagctgcgccaggaaggcaaggaatacgtcgtccaggacggcgacgtcatgcacttcaagttcaacgtgtagatggcggccccttcgggggccgtcctctgcttttgcgggtcgggaacgtctacaatacggggtgcgcgaagtgaggcgctgttcggttaagacgaaggcaaggatgtggcaatgacgtatctgggcgaggatatcccgaagctcggcttcggattcatgaggcttcccctggtggaggcggcgggcgagaagaccatcgacatcgagcaggtgaagctcatggtggatgccttcatggcggcgggtttcacgtacttcgatacggcccgcggctatcatggaggcaaatcggaagcggcgctgcgtgaagcgctcgtcgagcggtatccgcgcgagagcttccaagttgccacgaagctgccggcatggatggcggccgacgccgaagaggcgcgctcgatgtttgaaacgtcgcttgcggaaacgggtgcgggatatttcgatttctatctgttgcacaatcttggagaaacccgatccgctctgttcgaagactacgggctatgggaatttgcccgcgaacagaaagatgccggactgatcaggaacctcggtttctctttccatgataaggccgacgaattcgagcgcgtgctcgatacgcaccccgaggtcgatttcgtgcagcttcagatcaattatgccgattgggagagcgactccatcgagtcgcgcaagtgctatgagatcgcccgcgcccatgggcttccggtcgtcgtcatggagcccatcaagggcggatcgcttgtgaagctgcccgaaagcgttgcatcgattctgtgcgaagccgatccgaaagcctctcttgcttcatgggctttacggttcgccgcttcgctttccggcatcgtaaccgtgctttcgggtatgtcgtcgcttgagcaggtgcagcagaacgtcgggatcatgaaggatttcgctccgctgagcgaagccgaacacgccgttgttgcccgcgcgcgcaaagcgctcgacggactcccggtcattccctgcaccgattgccgctattgcatcaagggttgccccgagggcgtgcgcattcccgtggcgctcgcctcgctcaacatgctcatcgcgtttaacgacgaataccgtgcgcaggagaactacgattggaacgcaacgggcggggaggcttcgaagtgcatcgagtgcggcgcgtgcgaagaggtgtgcccgcagcatatcgccatcatcgacgagctgaaaaaggctgctgcggcgttcgagtgagcaactttgcccgggttggcggcgggctggcacccgagagcgcgacgtttcgttcgaaagatggccgccagggcgggtatcccataatcgagacactcttttgtggcaaactgtttaccgttgaaccgtttaccttaagcaagggagaaccatcatggtcgaggcaatcgtcgaaaggccactcgttcgaaagatatcgagcaagggccaagtgagcattccgaaggcatggttggaggacgggggtttcagcgaatacgcaacgattacgtttaccgaggaaggtatcctggttaaacccatcgagctttccgacaacgacgagttcgatgcgctcatcctacgggatcttatcgcgcaaggccttcagggtgaagagctcgtcagcgcatgggcggttgagaagaaggttcttcgcgacggcatagcctcgtatcatggcaaccttgttgcgcatgtcgatgcggcagatgttaaccccgatctcgatgatcttttcggttgctagattatgtacgatttcgtaatcgggccggccatgcgaaagggataaccgagcgagtttcgctgatctcttgcatgtatctctctgaaaagtcagacgaaggacgaagcgcttgagcggcaatcccgttcaagcgcttcgtctgctattggattatcggatgagcgcggctggctttcgcttgccggcattcatcggccggcgcaaagcaccgctaggaattcggcgcttcgggagctttcggcgcttctggcgcctcgggcgcgctcggtgccgtcgaaccctggtcttccgaggtgttcggtgcagcggctccggtaagcgcgaggtcgatgttgccgcttgccgttcgcatcgatatggcgtattcgccatcggcggatcctcgcggcgcgtggacgctgccgcttgcggtcgaggccgcgataacgaaatcgctttcggagccgataacgcgcgcgtcgatgttgccgcttgccgtttcgagagtcatggcggagccgaagcaatcgaacgcgtgcacgttgccgcttgtcgatgtggttacgaactcttcggcgttgactttcgagatcctgacgttgccgcttgccgccgttgcggagaagtcgagggcatcgacggtttcgacggagacgttgccgctcatcgaatttgcggaaaagcgggtgcaccgggccttggctgcatcgacgttcccgcttgccgtaacgagttcgatgctttgggcattcgcgtttttaagaaccacgtctccgctcatggcagacgcctcgagttcatcgatggcggtaaggtcagagatggcgacgttcccgcttgccgtttgaacggtgagcgatccggcgtactcggcgggaatcttgatgacggtcgtgcggtcctgcagatccataaccatgaatccgaatgtgggttcctgagagccctcgatcgtgagcacgccgtcgaggtcggtcgttgcaaagctcttgttggaattctcccagtactcgatctcgatcgattttcccgaggtgagttcgatgcgtacgttttccgaaccgtctcggacgacgatatcggtatgcgctgcctccgattcgggcgcaagcgtatcggaggtcaacacccaatcgcgtgtagtggaaaggttccccagattgaaatcggccatggcaagcacggcgaacgaaaggccgagtccgcttacaaggagcaccgtggcaacgatgagagtgattttctgcgctttagacatggtagggacctccctctacggtgcgcgcaacgggggccgccgcttgcgagcgcggatactctgggttgggggagcggcgtttcacgaacaggcccttgacccagttggcaaacgaatgggtgagcctgatgagtcccttgcttgcggcgagcacgccgaaccaggcgaacagtccgaggcctgcaccggcgagtccgcacccgagaatgtagagcgccggtagctgatagccgttggcgaggcaccagatgagacccacgatgccgatcgggccgcataaaagcagcagcgcgaccgtaagccatagtgcaaagacggtcagccatattgcaaagtacacgcacagcgcggcagcagccaaagcgatggcgatcggtatccagatgggggagaacacggcgagaagcacgatgttcagggtgcgcgagccggtgttggcctttgcgatggccttgggaatggcgggcgtttcggcggtgatctgcgcggcgatggcgtcgatgggtccgagttcgcggatggcatcctgctcgctcatgccgtcttcgattcggtcatcgatcatctcggcatagaaggtgatcgtttgctcgacctcgtaggaggggagcttgccgagtgctcggcgcagcgcgccgaggaattcttccttgttcatttggtggcacctcgtttcacgtattcatagacggtggtgatctcgtcccattcggccagaaagccgttcaggtacgcgatgcccgcctcggttattcggtagtacttgcggagccgtccgttatgctcgactgagtacaccgtgagcaatccagccgattcaagccgtttgagcagggggtacaaggttgattctgtgaggtgtaggtttgggggcacgtccttgacgatctggtagccgtaggaatcttgctggttgatcgatgcaagcacgcacacatcgagaaaccctcgcttcaattgcgcgtccatataatacctcctttcgcaagatactatattgcacatagtatcttgtgtcaacgggtatttggaaagcagtcgattcgataatttaaacgatggtcgcagggatgccggtcgatgagcgcttaagcttgtcgaccgttgatcgcttgtgcggagtcgatgtttctcaggagggacgggtcgtcgaacagcggcgtgcagacgaggtctgacgaacggagtacgttgtccttgttgcagagcagattttcaaaaaaggaagcgaggtagttgatcgtcggtttgatcccggctttcgcattgcggtagttggcgcgcacgagagcatcgcgaaagtatttcgcattgtcttcaaacgggccgttcgcaacatcgaacccgaggtggtcgagatacaattcggcgaatacggcgacggtgcgcgtgttgccctcctcgaaggggtggacctgccaaacgtttgcgatgaaagagctgaagcgaaccgttttgtctcgatcgaaggagaacccgtaatcgaagccttcttcccgttcgaaaagaagatcgagagccctgtcgatcaggaagggatcgccatacacgatgctgtcgccgtttaatatctcctcttgcttcatcagggcttctcgtttgtacttgcccgggcgatatacggtggaatcgaggtcttggaagaggtttgcgtgtattgcggcaagcatgtccggcatgaattgaaacgaccgcgcagcaagcatctcgacgattctttggctcacgagatcggcttcgcgttccccggaagaaggatgtggcgcgctggcttcgcttcgatggtacgttttaatgcgcgcgcttgtttccgaaagcgatagctcgcccgcaacgttcatactggccaattctcgcaaatagggcgacggctcgagcccgtcgactttctgcagcccgatcgccgtagcccaataccgtttgcgcacacgagagctttgggcgtctgcgacgggcctgtaaggaaaatctgctggattgtctgcggtcatgggctctttgcgctccgatggttttccaacgtggtttcgtttggccaattgtaccaaggaatccgcgcttttggttgcggggtctggatcgggggttcgcgttcggaggcatttcgtgcgttcggcgcgatggcccggccaaggcagctctttcggactcgccgccgaatcgacccgtaaatcctctgtgacgaataccgtttacgcgtcccgcgggcctgcaccctttgctatcatggacggcgaatgttttttgccgttcgtttctggtttcccgcaggggaaaagcgaaggaagtccaatgcctcaacacgtaaccgaaaaggatgtgcgcgatatcgcgacctatacgcggatcggccttaccgacgacgaagttgctcagatgaccgtcgatttgaacgggatcatcgaaagcctgaaacccatcaccgaatatgatttggatggcgtcgagccgacgtttcatccgattggagccctgagcaatatcatgcgcgaagacgaggagcaggagagcttcacgcagggaaccgcgcttgaaaacgctccgaagcagcaggacgggtgctttctcatcccctcgattctcggcgagggaggcgatcgctgatgacgaacttttcagagatgagcattcgcgccatccgcgaagggttggcggcgaaggagttctcggcacgcgaaatcgccgattcgtccatcgcgcgcatcggcgcggtggatccgacgatccatgcatttctcgaaacaaccgaggcgcttgcgctcgagcaggctgccaagctcgatgccgccgtggccgcaggagagcttgctgcatgcggaccgctcgcgggcgtgccggtggcgttcaaagacaacatgaaccaggcgggcacgcacaccacctgttcgtcccgcatgcttgaaaactacgtttcgccctatacggccacctgcgttgaaaaaaccatcgcagcgggaggcattccactcggcaagctcaacatggacgagttcgccttcggctcttccaccgagacatccgcgtttgggccgacgagaaacccgtgggatgtctcgcgcgttcccggcggctcgtcgggcggtagcgccgcggcggtggccgcgggtctcgcggccgttacgctcgggagcgataccggcggctcgatccgccagcccggcagcttctgcggcgtcgttgccgtgaaacccacctacggcgtggtttcccgctatggcgtcgttgcgttcggatcttcgctcgaccaggtgggtccatttgcgaagacggtcgaagacgccgcctatgcgctgaatgcgatctcgggtcgcgatccgctcgattgcacgagtcaggatatctcgaccgactttacggcgaacctcggacagggtgtgcgcggcatgaaaatcggcatcgtccccgcattcatggacgcccagggccttgagcccgaagtgaaggcgaaggtcgaacaggccgctgccaatctcgagaagctcggtgccgaactcgtcgagatcgagctgcccaacgcacaggctgccatgagcgcctactacgtgctcggcccctgcgaggcgttttcgaaccttgcccgattcgactcggttcgctacggctactgcgatccggggcacaaagatctcggcagccagtacgaggcgagccgcgccgcgggattcggccccgaatcgcgccgtcgcatcatgctcggcagctatcttctgtcggcaggcgtgtacgagaaatactactatcccgcccagcaggtgcgcacgctgatcacgcaagattacgcgaaggcttacgagcaggttgaatgcatcctcgcgcccgttgctccacgcacggccttcacgttcggcgaggtatccgaccccacgtcgatgtatttatccgacatgttcaccatctcgatcaacatcgcgggcaacggcggcatgagcctgccggtgggactcggcgccgaaacgggccttcccgtgggcgtgcagctcatcgccccgcagttcaaagacgagaatatgtttcgcgtggcggcggcgctcgaagaatgctacgacatcgagcgcatcgcgcctgctttcgccgatggaaaggcgggtgcctaaatgaagaagctcgaagaggtgctgcgcgattgggaggccgtgatcggcctcgaggttcacgccgaactcaccacgcttcagaccaagatgttctgcggctgcaagctcgaatacggcgctgacccgaacacgcatacatgccccgtttgcctggggctgcccggcgctttgcccgtgcctaacaaggcggccatcgaatcgatcgtgctggcgggtttggctaccaactgcgatatcgagaagcgctcgatgttttaccgcaagaactacatatatcccgacatgtcgaagaacttccagaccacgcagggtccggtggctttctgcatgcgcggttggcttgaccttgaagtcgacggccccgccgcgaaagagcgcatcgatctggacggccttgcgccgggcgagagccgcgagaacgtgacgcggaccgcggaagggtaccgcgcccatgtgggcatcacacgcattcacatggaggaggacgcgggcaagatgaaccatgtcggcggatccgagggccgcattgcgggagccacgcattcgctcgtcgattacaatcgctgcggtacaccgctcatcgagcttgtgaccgagcccgagctgcgcacgcccgaggaagcgcgcctgttcatgcagaagcttcgccagatctatctgacgctcggcatatccgactgctcgatggaggaaggaagcctgcgctgcgacggcaacgtgagccttcgccgccgcggagctaccgagttcggcacgaagaccgaactcaagaacatgaacagcttcaagaaccttcacgacggccttgcctacgagatctgccgccaggccgaggtactcgaagagggcggcatcatctaccaggaaacccgtcactgggatccatcggccaaacgcacgatcgtcatgcgcgtgaaagagacggccgacgactaccgcctgttccccgaacccgatctcgctccgtacgatctttccgacgagttcatcgaaggcgtgcggaaaaagcttcccgagcttcccgatcaaaaggcgaaacgctacgaagatgcattcgggctttccgcctatgacgcgcgtcatttggtcgagcatcgcagcacgtcgagtttcttcgaggcgtgcatggcgcttgccggcgatgcgccgcttgccaagccgcttgccaacctcatcatcaacgacgtgacgggctacctcaacgccaacgacggcatcgagctggccgatacgtcgcttacgcccgaaagagcggtcgagctcgtggggctgcttgccgaagacgccatttcgtccaagcaggccaaagaagtgtttgcggccataatcgacgaggacaaggatccatctgtcatcgtcgaggagcgcgggatgaagcaggtttccgattcgggtgcgatcgaggctgtggtcgacaaggtgctggctgaaaaccccgagaaggtcgagcagtacaaggcgggcaagacgggcctcatcggattcttcgtcggccaatgcatgaaggagatgcgcgggcagggcaacccgaaggtcatcaacgagcttttggcgcagaagctcggctaggtttaccggttgcagattacggcctagcaacgaaaccggggtgcctgcgggcgccccggtcgatacgcgatacgattgccgaagtctgttcgatctcaggaggaatcggtatgagcgacgagaaccacaggccgggggactggcagcacaaggcccagcgggaagatgccaacgatctgatgcgcgatccgaacgaaaaaaaatggcacaagcaaacgttctggatcgtgttcttccttttgatattctggccggttggcatcgtgttatgttggaagagcgattggcatatcgccatcaagatcatcgcgacgatctacgttgccttctgcgtctacatgtcatggaacatgtggcagataaccatgcagatggggtattaggctgtcgggcgctgctgcaacgcaggattcgcgcagtgcagaatattccgcgcaagccaatgcagcggccccgagctattcggggccgctgccgttcgggctcttcggtcgcggcgtaaaatctgatgcgggacgcaaagcttacgctgcgggctttgcgagaatgatccagtggccttcgtcgtcggtgttgatgatcgtcagctcggcatcggtctcggcgaagagcgctcgatactcgtcatcggtcaatgccttggaatttttcctgtcgaagcaccgggggccctcgccgccgttcctgtctcgctcttcggtcatttttcgcttaatctgctctccgatttcggcgttcccgagcccgcccccaacgtaagcccagccgcccggtgcaagcagtcggtatatcccctcaaacgcagcccgctggtcatcccaaaacggcatgctgccccgtgagacgataaggtcgaacgagctttcgggcaggtcgagcgcacatgcgtcttgccgactcgttttcatgaccgggcgaaggccccgttcttcggcgcgcttttcggcgaccctcagcgcctcggggtttgcgtcggcgaagacggccgattcgaaatccccccgatcgagaagctcgaaacccaaatggccgcccccgcagccgaggtcgaggagccttcccgtgcgaacgcccgttgtatcgagaatcgccttggcaacgatggggtagaccggtgcgaagaagttctctgctatctcgtcataggaaaagtcttctgccatggattgctcctttgtattcgtatcagaataatagaacagtatatatcgaacggcgccgatatagggcgacggtgccgagctgcgccccgattcgtgacggttgctcgctttcgaacgcttgcctccgaaggccgtggattctgatgcggtgtccccggttcggctttcgaagcgagggcgcgcggccctcgaatgcggatcgcggtcttccttgctcaaaatcgcccaaaaatggcggtcaaggcatgcttccgtcaccatttgggcctcataaggggtgcttttcgcgccatttgaggatcgctgtcagcgtttcccctgatcacaattatggaatagattatatagcgaacccaatcctgacggaagcatgccttgaccgccattttttcgggagatatacgatttcgctctgctgtacggctgagctgtggaatggtgcatcgtatgcgaaatcgaccgctgggcgctctctttgcgggcgtttggtctcctttgcgaaaaatactattgctttattactctactgtgctaaagtacagacggcgataatgggaggatccccccatacgtgcgctatcgacgctgaggcggcgagctcgacgggtgcagtagacgcaatgcgccgaatgcagattcggcggaaacgtgcaactatgcaagaacaagaacatgcgttgtcaaagcgggttcggcgggagatcgtggcatcctcgtgccgaatgcgcgctaccgcaccgcatacgggccgctgaaggtaaaattgatgcgatcagcatcggtataggcggagacgcggctaattcagatgaaactatcgagcggatagaggaacgagacatgaatttcgtcaccccggcagggttcagagacgtgctatcggatgaggcgcgcatgcgcgaagacatgacgcgccgcgtgcagcagtgttttgacgaacgaggctatgtgccaatcgagactccgacgctcgaggttatggacgtgctgcaggcggggggcagaatgcccgccgcgccgttcaagttcttcgattctcaaggcgatctgcttgccatgcgccccgatgtgacgctgcaggttgcccgcatgtgcgcgacgcgcctcaaagggcagcccggcccgttccgtttccgctatacgcaacgcgtgttccgcgaagccgagtcggagatgcaggcggcagcgcgcgaaatgacgcagatgggcatcgagtgcatcggggaagagggtcctgcggccgatgcagagatggtcgggttgcttgccgaagcgcttcggacttgcaatgtcgggggattcaagctggctatcggaacggtcggcgtactccgcgcgctgctcgaaagaagcggtgcgccggaagcgtggaaggaatccgtgctgcaggcgtaccactcgtctaatttcgtcgatctcgaggtcctttgcgccgatggcacggtgggctcggcctttgcggatgccgttctctccctcccgcgcatccgcggcggcaaggaggctatcgccgaggtgcgttcgatcgtttcgccgctcggctgcgtcgacgggctcgatgcgttcgagcaaacctacgatctgcttgtccgggaagggcttgccgaaagcatcgtcgtcgatttctcggtcatgagctcgttcgactactacacgggcatcgtcgtcgaagcgtatgctccagggctcggtgccccgctgggcagcgggggtcgctacgataacatgctcgccgcgtacgggcagagtcgccctgcggcgggattcgccttttcgctcgaacaggtgatggcggcccagacggtcggagctgaaaacgccgggtcggccgcgtctgtttcggcatcgcgtatcgagcggccgttgcgcattgcggttcccaaaggatcgctcaatgcggatacgatcgcggctctctcggcggcgggcctcgatacgacgggcctcgataatccagggcgacagctcatcatttcaaacccaggggtcgattacatcatcgtccgacccacggatgcccccgcattcgtcgcgctcggagcggcggattgcggcatatgcggaaaggattcgctgctcgaagccgatcccgatgttgtggagctcgtcgatctaaagttcggcgcctgccgcttcgtggttgccgagcctgccgatgcgggaccgtcggttgaagaccactaccggcgcctcggctccattcgcgtggccacgaaataccccaacatcacaagcgcgtactacgcgaaggccggcatgcaggtcgagatcgtgaagctccacggcaacatcgaactcgcgcctttgacgggcatggccgagcggatcgtcgatatcaccgctacgggaacgacgttgcgcgagaacaacctttcgatcgtcgacgaggtgctctcctctaccgcgcgcttcttcgccaacgcctgcgcgtttcgcatcgatgcgcgtattgtagaattgaccaaggccctgcaggggtcgtaaggaaacaggccctgcaaggggcacaggaaaagcaggccctgcaggggtcgcaagcataaggaggagccgtgcgcaggatcgtcttgcaggccggaaacccgttcaaaaccgaatacttgaaccgcacgggcgcgttcaacgccgaggcgctcatcgccgcgacgtcgatcgtcgaagacgtgcgcgagcgcggcgatgccgctttgagggaatacaccgagaagttcgacggcgtgcggatcgaggatttccgcgtatcgaagcaggcgatcgacgaggctatcgtcgacgttgcgcccgaaaccgccgaggcgctccgccaggcggcctcccagatccgagatttccacgaacgccagcgccagcaaagctggttcaccgtgcgcgaagacggtgcgcttgtcggcagcaaggtcgagccgctcgaatcggtgggcatctacgtaccggggggtcgcgcgctgtatccctcgtcggtgcttatgaacgcgcttcctgcagcggttgccggcgtgaagcgcatcgtgtgcgtgacgcccccgacgaagagcggcaagctcgatcccgccattctcgaggcgtgccgcatcgcgggcgtaaccgagatctactcggtgggaggcgcgcaggccgtagccgcgcttgcgtacggcaccgagaccatcgagccggtatgcaagatcacgggtccgggcaacgcttttgtagcagcttcgaagaaagtcgtctcgggcgatgtgggcatcgacatgattgccgggccctccgaggtgtgcgtcgttgccgacgagacggccgaacccgcactcgtcgccatcgacctcatggcgcaggccgaacacgatccgcttgcaagctgctatctcgtcacgttctccgaaagctacgccgatgcggtcgaggcggccgtcgaaaagcacatggcctcgaccacccgtgcggaaatcaccgcgtcatcgcttgccgatcagggacttatagtcgtgtgccccgacattccgagcgcgatggaggccgtcaacgtgattgcgcccgagcaccttgagatacacatggaccacgcgttcgatctgctcggcatgattcgcaacgccggggcgatcttcctcggcgcctggacgcccgaggctgtaggcgattacgttgcagggccgaaccatacgctgcccaccggcggtaccgcccgctacgcttcgccgctgtcggtcgacgagttcgtcaagaaatcgagcgttatccagtattcttcggctgcgctcgccaacgacgcttcagccgtcatgaccatcgcccggcacgagggactgtgggcccatgcaaagagcgtcgagctcagatgcaacctcctgaaaaccggaaacctgtacggaatagaagactccgatgaataacgtgagaccgtcgtgcgagcgcttggaagcgcttgtgccctacgacccgaaataccttcccgccgaagcctatctgtctgccaacgagaacccgcaggacgtgcccgaagaggtgcgtcgcgaaatcaaccgcaggctgaagacgatgcagttcaaccgctatcccgatccgcttgccaacggcttgcgcgagaagatcgctgaagcgaacgggctcgagcgcgaatgcgtgctggtgggaaacgggggagacgagcttctgttcaacatcgcgctcgcctggggcggtccgggacggaccttcctcaacctgccgccgacgttttccgtgtacgagcagaacgcgctgctgacgggcaccgaggtcgaaagcatcccgcgcctggccgactactccatcgacgaggaggcggtgctttcgcgcgtggcgcaagggggcgtcgactacgttatcgtggcgagcccgaacaacccgacgggaaagcttgcgagcgaggagttcctcctcaaactcctcgatgcgaccgatgcgctcgtcatgatcgacgaggcgtacttcgagttttcgcgcatgaccatgcggccgtatctcgcgcagcacaagaacctcgtcatcctgcgcacgttctccaaggcgttcagcctggccggcgtgcgtctcggctacattctgggcgaccccgcgatcatcaccgagttcgtcaaagtgcgccagccttactcggtcgatgccgtttcgcaggcgatcgccgaggccgtgtacgagaaccgtgcaagcttcgagaggggcatcgtatcgattatcgaagagcggtcgcgcctggtcgacgagctgcgcaagcttcccgaagtgaaggcgtatccgtcggatgcgaactacatcttgttcaaggcggaaggcgcaggcgagatatggcagagcctctacgatcgaggcatcctggtgcgcgacttctcggcagccgagcacttgacggactgtcttcgcgtcaccatcgggtcccctgaggaaaacgagcggttcatgaccgcgttgaaagaagttctgatcgaaaggcggagggcatgagcgagttgtttgctgccggtgaggcgcgcgcggcgtctgttgggcgcgaggcgggcggatgcgctgcggaagccgcgtgtttcgccgatggcgaaaaagggtcgttcgccggccgcatcgccaatgtggcgcgtgccacgaaggagaccgatatcgagctcgcgctgaacctcgatggtacgggcgtgaccgacgtcgagacgggcgtgccgttcttcgaccacatgctcgatgccttcgggcgccacgggctgttcgatttgaccgtgcgggcgaaaggcgacatcgaggtcgatgcccatcacaccgtggaagacgtcggtatcgtgctcggccaagctttcgcccaggcgctgggcgacaagcggggcatcgtccgcttcgggtcgagctacgttcccatggatgaggcccttgtgctcgccgcatgcgatctctcgggtcgcggccaacttcactacgcggtcgatctgccgatcgaaatcatcggtacgttcgatacgacgcttgccaaggaattcatgatcgcgcttgcgacgaatgcgggtgtgacgctgcatattcgcagtttgtcgggcgaaaactcgcatcatatcatcgaggctgccttcaaggcgtgcggacgggcgctgtgcgatgcgacgcggatcaaccctcgcatcgccggggttcttccttccacgaaaggttctctgtgatggcggccgtgccaacgcccgctctcgcgaaggcgccgcgcatcgcggtcgtcgattactgcaagggaaacctcatgagcgtcgagcgggggctgcggcgtgcgggtgcggatgcgttcgtgaccgccgacgtgcgcgagatcgcccgcgccgatgcgatcgtgctgcccggagtgggggctttcgccgatgctgcggcgaccatgcgcgaaaccggtcagatggctgcggtgcgcgagcgcattgcggcgggagtgccgtttctcggcatctgcctcgggcttcatctcatgttcgacgaaggcgctgaaggcaccgatttcgaagatgggaaagtcgacaacgcgcatgggctcgctgtgcttcccggtgttgcattggcgatgcccagggtcgatgatcaggggaaattctacaaggttccgcacgtcgggtggaattctgtcgattatgtctccgaggccgaaacgccgctgcttgcaagcattccgtcgggcgaatacttctacttcacccacagcttcgttgcccccgatacgccctgcaccgttgcgaccacgacgcactcgatatcgtttccgagcgtcgtttcttatcgcgacacggcattcggcgtgcagtttcatcccgagaagagctcggatgcggggatggtcctgctcgagaatttcgtcggcatcgttcaaaccgcgaaaggcgcgtgattccatgtacctccttcctgccatcgatatactcgacggtcgtgcggttcgcctggccaaaggcgattacgcaaaggtcaccgtttacaacgaggaccctgccgaccaagcccggctcttcgaggaggcgggtgcatcgtggctccatgtggtcgatctcgacggcgcgaaatcgggcatgcccgaaaacatcgcgatcatcgagcgcatccttgccaagacgctcctcaaagtggaggtcggcggcggcattcgctcgatcgagacgatcgagcggctctatcaggccggggtgtcccgcgtcgtgctgggaacgagcctcgtggccgatcccgcgttcgccgaggcggcgatcgagcgttacaaggggttgctggcagccggcatcgacgccaaaggcggcgaggtcgccgtgtcggggtggcgcgagggcgcgggcgtgcccgccgaagagcttgcggcccaggttgcgcaagccgggttcaagcacctcgtctacaccgacatcgcgcgcgacggcatgcagacgggcattgacgagaatgcgtacgtgcgcatggccgaagtgttcgggaaccccgtcacggcctcgggcggagtagccgatctttccgatatcgaacggctcggtgccgttgcgggaagcgtcgagggcgtgatcgcggggcgcgcggtgtacgaaggcacgctcgacgtggccgaagcggtagcggcttgcgaagcggcgacccgcgcgttcgaggcggctcgcgcagccgaaaacccctgcgggggtggtctcggtgcttgctaaacgcgttattccctgcatggacgtgcacgacgggcgcgtggtcaagggcgtcaacttcgtgaacctgcgcgacgcgggggatcccatcgagcttgcgcagcgctacgacgaggaacgcgccgacgaggtcatattcctcgacatcacggcaacgagcgacgatcgggcgaccacggtcgacctggcgagccgggcgagcgaagagcttcatctgccctattgcgtgggcggcggctttcgcagcgttgccgacatccgcacgatgatcgccgccggcgccgacaaggtgtcgatcaattccgccgcggtagccgatccttccatcatcaccgccgcagccgctgcattcggctcccaggctatcctgtgcgccatcgatgccaagcaagttgcgggaaaccccaacaaatgggaggtctacgtgcatggcgggcgcaaggcgacggggatcgatgcgatcgaatgggcgcgcgaggccgctcggcgcggagcgggggagatcctgctcacgagcatggaccgcgacggaagccgcgacgggttcgactgcgcgctcactcgcgcggtgtcgcgtgccgtgaacattcccgtcatcgcatcgggcggcgtcggcggcatcgagcactttgcccagggcatcatcgaaggggaggccgacgcggtgctcgccgcaagcgtgttccatttcggcgagctgacgatccgcgaggttaaagaatacatggcaagccaaggcatttcggtgaggccgtaacggcatttgcgagcgaagggcggcgtatggacgaaatagagctggcatacaacgaggcggggctgatcccctgcatcgtgcaggacgcggaaaccaaagacgtgctgatgatggcgtggatgaacgccgaggcgctcgcgctttcgctcgagcggcgcgagatgtggttctggtcccgttcgcgctccgagctctggcataaaggcgcaacgagcggaaacgtccagaagctcgtcgagttgcgctacgattgcgacggcgatacgctgcttgcgctggtcgagcctgcgggccccgcatgccacactggcaatcgtacgtgcttttaccgggcattctaggcgagcgcgctcttttccgtcaccttctccatcggtgggcgagtctgctttcgcccgttgttttcaccgggcgcccgttgtggcaaagcgggaggtcgcccgctttgccacaacggtgtaatctttcgtgttgatgtggaaaaactcccttgaaagcacaggaaacatacgctaccatgagtcgcagttcttatatctcttggaagaaagcctatttttcaaagatcaaaaccccattgtgaaaagcgcgcgttttgccgcgccgtatgtcttgaggcctgaataaaggaggacctgggtgaagttttttctggataccgctgatctgaacgagatcgaggaagcggcgagctggggcgcgcttgccggtgtaacgaccaatccctctctctatgcgcgcatcggaggcaagctttccgatttccataatcacatcaagcggatctgcgacatcgtcgacggaccggtttcggctgagagcgtggcgatgacccgtgacgagatcgtccgcgacggtcgcgagcttgcggcgatcgcccccaatgtggtcgtcaaggttcccaccatggtcgaaggccttgccgcaacccacacgcttgcggccgagggcattcccgtcaacatgacgctgtgcttcaccgttccgcaggccattctcgccgcccgctccggcgcccgctacatcagccccttcgttggccggttcgatgacatctccgaagacggcatcgaacagctcggcaacgtcgtggctgcgatcaacaactacgatttcacccccaacaccgtaaacggcgagcaagtcgagatcatcgccgcatccattcgcagcgccaaccacgttacccaagcggcgctcatgggcgccgatatcgccaccgttcccttcggcgtgctgaagaagatggtggctcatccgcttaccgatcgaggcctcgatgccttcatgaaagactgggagaaagttcaaaacgcatgagtgataccgaaacaaccgtagccgcagaggctgctccgaccgaggagaaggcccctgcgaagcgcaagccgcgcgcccgtaagacggcgactgcaaccgatgcagcggcacctgcggaacagcaggcgcccgaggcggcgaatgagcccgaggccgaaaagaagcccgctcgcaagccgcgcgcgaagcgcgtcgtcgtagagacgggaaccgccgccaaggtccagggcgaatcgtcctcggattccgcaaccgacgagcccaagcgccctgccgctcgcaagcgcgcagcggccaaacagcccgaagagaagcccgctgcagagagcaaacccgaggagcaatccgcaaagcagccggtcgagcagcaatccgagcggcagcccgatgacaggcagggtgcacagcgtcagcggacgaatcagaacaagagcaagcaacaaaaccagaacaaccagaaccagaacaagaacaagcagaacaacaagcagcagaacaaccgacagcaaaacggcggcggcaacaacgccaaccagcgcaagcagcgccgccagcatcagggttcgaaccgcgagcccgtggttccgcagaccacgcgcgaggacatcgagaagctcaaggttgccgagctgcgcgccaaggcagaggagctttctctcgatgtgaccggccttctcaaggccgatcttatcgagaaggtgtacgaggcatgcgtgaaggccgaaggattcatcgaggtcaagggtgtgctcgacatcctggccgatggatacggtttcttgcgcacccaaggttatcttccgagcgaaaccgatgcctacgtggggctttccaccatccgccgcaacggattgcgcaagggcgatttcgtcgtggggcagactcgccccccgcgcgagaacgagaagtacgcggccgtacagaagatcctctcgatcaacggcaaatcccccgaagctctcggaaagcgcgttcgctttgccgatttgacgccggtttaccctgacgagcggctgtggatggagcacggcaagactaccatcacggcgcgtgtcatcgatttggcggctcctatcggaaaaggccagcgcgggctcatcgtgtcgcctccgaaggccggtaaaaccacggtgctcaaagacattgcggcatccatttcagccaacaaccccgaggtgcatctcatgtgcctgctcgtcgacgagcggcccgaagaggtcaccgatatggagcgctccatcaggggcgaggttatctcttcgacgttcgatatgccctgcgagaatcacattgcggtttccgagcttgtgatcgagcgtgcgaaacgccttgtcgaggagggggccgacgtggtcatcctgctcgattcgctcacccgcctggcacgcgcctacaaccttgcgcagcctgcaagcgggcgcatcctttccggcggcgtcgattcgaccgccctgtatccgcccaagcgcttcctcggcgccgcccgcaacattgaaggcggcggcagccttaccattctcgcatcggctcttgtcgagacgggttcgaagatggacgaggttatcttcgaagaattcaagggcacgggcaatatggagctcaggctcgaccgcagtctggccgatcgccgcatcttcccggcaatcgacccggtttcttcgggcacgcgcaaggaagatttgctgctcgagccgcaggaggccccgctcatctgggcggttcgtcgtattcttgcgaacatgaacagcaccgagcgcgcaatggatatgctcatcaaatctttgaagcagaccagcaccaatcaggaatttttgttgcgtactgccaaaaaggcccagttgaacaagtccgacgagaacttcgagctgtaagcgcaatcgataccgtaaaggtcctgtaacgaagggccgaagcgtcggcttatataatgaaaaccgcgcataccctgcgcggtttcctccctctagggaagacgactctacggacgataaggagaaggtatgtccgatcagaacaattggcagcagcaggtgtggcaacagccgcaaccgcagcaaccccaaggctatcctcagccccagcccccgtattacgctcccgagccgccgaagaagggcaagggctggatcgtcggcttagctgccattcttgcgatcttccttttgctggttatcggcatgatctcgtgcacgagcgcattttcctcgtcgatgggatcgttctcgtcgttttcgggctcctcggtgagcgatgtcgattacttgaccgaggatgccgttggcgttatcagcatcgacgggacgatccagtacgacggtacgacttcgagccccgagggcctgaaggcccagctcgacaaggccgagaacaatccgcacgtcaaggcgatcgtgctgcgtgtgaactcgggcggcggcgtggcgacggcgggcgaggagatgacggcctacctcaaagagttctccaagcccgtcgtggtctcgagcgcctctctgaacgcgagcgccgcatacatgatctcgtcgcaggccgattacatctacacggccaagacgacgtccatcggctctatcggcaccgccatgtccataaccgatctgtcggggctctacgaaaagctcggcatccgcatcgacgacatcacatcgtccgatagcaaggattcgagctacggcaaccgccccctcaccgatgaggagcgcgcttactaccaggatatggtcgatcagattaacgagacgttcatcgaaacggtagcggatggccgcgggatgtcgatcgaagacgtccgagcgctcgcgacgggtcttacctttacgggcatgactgccgtcgacaacgggcttgccgacgagatcggcaccctcgatgatgccaaggagaaagccgcagagttggcgggaatctcgaagtacacgaccgtaacgcttgcaaacaacacgtcgcacgatatgatggatctgcttgacatcctcggatcctcatctgcgaccgatgaccttgtcgctgcattgaaggagctggagcaagatggtgccatcacccgataagccgagctggccgaagcgcgccgttgtgacggcgggcatgccctatggcaacaagccgctccatttcggacatatcgccggtgtgttcgtgccggccgattgctacgcgcggtttctgcgcgaccgtatcggcaaagagaacgtgcgcttcatctcgggaaccgattgtttcggatctcccatcaacgaaggctaccgaaaactcgtcgaggcgggcgagttcgaaggcacgatcgccgattacgtgcagggcaaccacgacgcgcagaagaagacgctcgatgcctacaacatcagcctgtccatctacgagggcagcggcatggggcactcgggcgaggtgcatcagcagatcagcgaggcgttcatcgaaaagctctacgagaacggctatctgcacaagcgtgcgacgctgcagttctacgacccgcaagccgagacgtttctgaacggccgccaggttgtgggacgctgccccgtgcaggggtgcaagagcgagcacgcctacgccgacgaatgcgatctggggcatcagtacgcccccgaggatctcatcgcaccgaagtcttccataaccggtgcgacgcccgagatgcgcccggttgagaactggtatttcgatctgccggcgttcgctgggtttcttcgtgcgcggacggtcgagatggaagccgatcccgaggtgcgtcccgtcgtgtacaacacggtcaaggaattcttggctccgcctgtcgtatacgttaaaaacgaggcgtacgacgagtaccgtgcgttggccgatgagcttccggtgcattcctaccgcgaggccgagaagggcaagcagagcttcgagatcgagttcgccaccatcgacgatcgcgatgcggcgcgcgaagtgcttgcgcgcgcgggcatccgcttccgcatgggcaagacgctgaccccgttccgcatcacggggaacatcgagtggggcgtcaaggcgccggtgatcgacgggctcgaggggctgacggtgtggtgctggcccgagagcctgtgggctcccatgtcgttcaccatggccgtgaacgacaagatgggcatgccgcgcggcagctggcgcgacttctggtgctccgaagatgcccgggtctaccagttcatcgggcaggacaacctgtacttctacggcgtcgcgcagccggccctgttcgaggctatccgcccgggcgacattctgcaacccgggatcgccgagcacccgctgcagcagacgaagctcatcgcgaactaccacatcctgttcggcgataagaaggcatcctcgtcgggcgccgtcaagcccccgactgccgatgccttgctggattactacacgcccgagcagctgcgcgcccactttctcgccctcggcctcgatcagaaatcggttggcttcaagcccaagccgttcgaggccgacgaagcgaagcgcgacgacccgcgcgtggcggacccggtgctcaaggagggcgcgcttctcaccaacgtgttcaaccgcctggctcgcagctgcttctacgaagctcagaagaacttcgggggttacatgccgatcggcaaggtgtcgcccgaagtggtcgagaaggcgcacgagacgcttatggcctacgaccataccatgtacaaagccgagcttcatacgatcatgtcgcttatggacgagttcatccgctggtcgaacaagtactggaccgagcagatccgcgtggtcgagaatgcgctcgcgtctctcgaagaagcggacggatcgggcgagccggactcctctttgtccaccgtcgaggagattgccatccgccgccgtcaggtgctggtcgattgcttcttccttttgcgcatggcaacgctgctcatgcatccggtggtgccggctggcaccgagaagatctgcgattatctgagcttcgagttcgatgagttcttcagctggaattacgatttcgaagacaacgccgagttgtgcggtgcgggggagatcaccgaagggcggcatcgcattcgcgagctcccgcctcgcaccgatttcttcgagaggcatccaagtcagttcaagtaggtagaagagggccttcgggccctctttttgcaggtgggcgccgacggggctttcgcagtgcgctccggttggctccgtggatcgcccgagtcttgcgaggcgttcgggccgtattcgtccttttcgtgttgacaaatcatagtatttagctatgattaatgatcgtcatgggcaactctgatcgacataccatccgctgcggcgacgtttgcgaggcttcgctttcccttgcggctcgccccgcattctcccttggcatgcgcatgcgctagcccgggctccttgacggcgtcgaacgccgacaagccccgggcttcttctcgtccgaaatacgggcgtccctgcttgccgccgaaactggcgcgagccttctgccaaaccgcacacttaaggagatttccatgccgaaattcgatacgctcgccatccacgcgggcacccgccccgatcccgagacccatgcccgcgcgctgcccatctaccagacgaccgcctatgcgttcgaggatgcgcaggatgccgccgatctgtttgctctgaagaagttcggaaacatctacggtcgcctgacgaatccgaccgtcgacgcaatcgagaagcgcttatgcgcgttgcatggggcgtcctactgcgtcggcgttgcctcgggtcatgccgccgaagtgctcgcgctgctcaacatcgtgaggacgaaagacgtcatcatcgcctccgactctctttacggcggaacctggaacatattcttgcataccttcaagaatctgggcatcgaagtgcgattcgtgcatgccgatgcgcaaagctttctcgaggccaccgaagctgccgatgaggaggggagagtgaaggcctggtatctcgaaacgatcgggaatccgcgcctcgatgtgcccgacattcccgccatagccgaagcgggtcgcagtttgggtattccgttgttcgtggacaacacgttcgcaacaccgtatctgtgccgtccggctgagcttggcgcggcggtgatcgtcgaatcgctcacgaaatggatcggcggccacggaaccgcgctcggcggagccgttgtcgatgcgggcaccttcgattgggcaagcgaacggttcccgacgctttcgcagcccgatgcgagctatcacggccttaatttcagcgaatcgttcggtgcggtgcccggtcttggcaacgcggcgttcgggttgcgcgtacgtgctcagatgctgcgggatttcgggccgacgctcgctcctctttccgctcatgaaatcggactcggcatcgagacgctttccctacgggtgcagcgccacagcgacaatgcctttgccgttgcgcgctaccttgagaaccatccccgggtttcctgggtttcctatcccggtctcgagagccatccgtcccacgagacggcgaaaagggtgctgggaaacgggttcggcggcgtggtggtgttcggcgtcgagggcggccgggaggcgggcatccgcttcatcgaggggcttcggttgttttcgaatctcgcgaacgtcggcgatgcgaaatcgcttgtgatccatccggcgtcaacgacccattcgcagctttccgaggaagagctcgatcgcgccggggtgggaagcgatcttatcaggttatcgattgggatcgaggatatcgtcgatatcctcggggacatcgaagctgcgctcgcgtgtgtgtgatgcggatcgcgcttccgaagatcggctatcggaagacacatcgaagctgcgctcgcgcgcgatgcgggcaagcgcagcttcgatgccttctttgcggctcggcaaaaagggagcgtttctgccgagccgcgggaaaagcgaacgatggtcgagccgcctgccttaggcgatctcgaacagaagcgttgcttcgaggggcgatacgacgccgtctgcggtctttgcgcggacggtcatgcggtagtcgcctttttcctggaacgaggtggtgaactgccagttgacccatttgtcggccgtggcgccttcggtttcgcagctggtccaggttgcgccgttgtcgaaggagaactcgattgcggtgatcgggctgcccaaatcgtcggccacaccttcgaaggttatttcatctcctgccttgaacaggcattcgtcggcattgttcatgatgtttatcttgttgcgatacgtgggatcgacctgttggacatcgggcacctgctcttcttgggtcagctcgatgtccacgatgctgcgcgtgaagtagcgggcaaccgtttcgggcatgaacagctgcaggctcgatccatcgccggttgtggtgagctcttcgccgttgacctgatagaccaagagcgcatttttctcgagcgcgtattgcagcggcagaggctgcccgaacccatcggcgccgtaggcggtaacggtgttcacgccatcttcgaggtcggccatctcgacaacggccgaaagcggcacgcccatgacggcgacctggccgaagggcgatccggtggcgcacgagcaggccatcatcgcctgatcgctcacgtcttctgaaagatcctctatgttgaccgtgaagttcttcttgatgttgccgcctacgttgacgtagtagttcgctacgcctccctgttcctcggcgagctctgcagcgggcttcgagcacatgctcgtaagcgttgccccgaagatgttgaacagctcgtcgttgggcgtgacgccttcctggttgaaggtgaaagagccctgcgcgtcggccaccttgacgtaggggctttcctcttcgtccatccatcgagcgatgatctcgcgatcgccgacggtatgggtgtttgcctgaggctcagcgttttgcgcgccgtcctgcgattgctggattggcgaggcgatggccgtagccgttccgaagagaagcagggcggagctggccacacccgctgcgatctttttcggtgtgttgaatgacatcgtggtcccccttacttgtcttcctcgttggttgcctcgacgctgactttcggcggtatgagcgatccggaagtgagaaccgtggtctcttcaggcgtcgggagcttgtccttggcgttgatcatgacggtttgggtttcgaagctttcggcgccgctttccgtggtggcgcgcactgtgaggcagtaagcaccttcgagttcgggggtgtaggtgaagctccaccaaaccatcttgttgcggtcggtatcgccgagttcgtacttggtccaggtctcgccgccgtccatggagaattccatcgaagcgatcttctcgtcgtaggcatcgacgtagccttcgaacgtgaagggctgtccgttttggacgagcaggccgtcgggcacgcccaggatggtggcgttcggcttgttcatgggaacgttcgcctcgttctgccatccgttgggattgccagcccacttgtcggtgtagtcgatatcctcgttcgttacctcgtaggtgtcgatctgcttggagttgatctgggcatcgacgccctcaacccaattggtgcacgggtagccgcgcgttgcgtcgaggtactcgccgccgatcttgtacacgagcagcgcttcgtcgctgtcgaccttgtctttcgggaaggcgcgcttggaactgccgtcggcgcgaagggcgcgcacgccggtcgtatcgtctttgtagccgccggctttctcgatgagccagctgaccgggatgccggtgatttcggtgttcgtcacgccgccgccgccgatcggattccagttgcagaccatcttggaggttttctcgaccacgacgcctgcatcctcggcctccttgatgagatcggggagcttggcggtgtactcgctgttcacgttgcccttgacggtgatggtccactcgtcgaacaggctctgcggcatttcgaggttcaggccgttgacgcctgcgccatgacgcatgttgtcgtagtatgcgtgcatccagtcataggagaacacgccgtcttgatcctgggtcttctcctgatcgaccttgaaatcgccctgaacgtcggcgatcttgttgatgccccagagacgatcgtatttggtgagatcccatagttccagcccttcgccgttctcggtggcgttgtggcaggacatgcagtcgccttggaattcggtggcgaactcggtcttgttgcgggcgccgaaatggatgccgtgcatgagcgttccgaactcgtactgcttggcgatgtagccgggagcgtacgaatggcagaacaggcactgctgcagcgtggtcttgttgtccagctcgtcgttccaggcgacggggtgctcgtagggcaggttcttcaaaagcgagttcatgtccggatggcaggactcacagccgcggttatccgcgtcgagccagtaggtgttgtacgaattgctgcccgcttggatttgccaggcatcgggattgacctcgtactcagtgggcgtgcgctgtaccatctggccgttcggaagcgtgcgaatttcgggagcgtattcctcggctatctgatcccagcggtcccaaaggccgttgaggtattctttgccgggatagaattcgtcgttgatatccgaattcgtggtgccttcttcgccgtcgatgatcgcctgctgttcgggcgtgaggctttcttcggccgtcggcttcgtatcgcctgaatcgcccccacccgatggctgctgctgggcttcctggctcggcgagcagcctgctatcaggccgaaggtgcatgccaggcacatcgtcgtgatgacgagtcgctttttgactgacatagttcccctttctctctactccttggtttcggtttcggcttgcgcagggcaaccgcatgccgcaaccgcctcatccttgacctccgacgcgtcgcctcctttcttccgcctgcatcttttttgcatcggatggcgtgcttcagatgctaggcgcgtggttgaaagcgcaccatcacccaaaggtccgatttgcgaaaatgcaggtcaattgcgcatcggccactttgggcgatggctgaaagcggaaaaaaccgcggctaatccgtcgcttcgccttggttttgggatgcatccgaaaggatgacgtgccataatggatatcgatacgtgatgcggtccgcgacaacgccgcgaggggaatatctggaagggtagggatcgtaacgctatgcgcttgcgcagtgtccgggtaaataagtgcggagtattcgccgccatcggcctcggtctcaatctcgtgtggtgcacgctcatgggccataccatggggttcatgtcttcggcggccggcatagaggaatgggtcaacccccggatattcttcctggcgggcatccttgttctcgccgtgctttacattatcttgccgcgcgcgctcaagcactccgatcgtgtgctgcgctacgttttgccgctcctatcggcattcggcaccgcctgtttcggactttcgtaccatcagacgtttttcgatccgggcgcgcttgccgtagggggtttgttcgtcgccggtatcgggtatttctggcttgttgcccgctacaacctcatgctcgcccgcacgcaggggttctcgtgcgccgtgtggtcggttacgggcggcttggtggtcaagcttccgatcctgtttgcgctcagccttcttatgagccccgaatggcaggtcgtcgtcgcgatcgctttgccgatcatttcggcgctcgtgttcgagatcgcctgttcgctggcccgaagcgaagtcgaaagcgatgagcgtccccgcgacgatgcgtccgcgaaggctcggacggtctacggagtgccggccaagccgagaaccgttacgccgaattcccaaacgtttcgccgcaacaccataatcatgatggcggtgtcggccattctcttggcggtgatccgctcggtgagctacctcggcttgtggggcaatacgaatgcgaacatatcgctttcgccgccatggctcatgggcttcatcgtgccgtcgctcttcctcgtcgcgtttgcgtatttcgccctgatacgcatggcggacttcacgttgaccatgcgcttccagcctgccatgctgctcatcatgatcgggctgttcgtcgttgcgctgcaagcgaaccccggcagcgattctctgccgtttctcaccgacgtcatacagatcgacgagctgttcgcgcacctgttgttctggacggtcgtcatcaccgcgctcgatgccctcgatatgccctcgtatcgggtcatcggcatatcgggaaccatttacgcggcggcatccatcgcatgggtgctgcttttgggcacgtcggacatcatgaacaacatcttcgtgctgctggcgacttatgttgtcgtgatcgttgccatgtatgcgacgtggctcgggggcaagcgccgcacaggagtcgacgtcgcaggggatcgaacggccgatgacgatgctgcgcgcggttctcttcgcgatggtcgaggcggcgattgtgcggcggcgggcgattcctcgcacgcctccccgcttacgaagaccgtgacggatacctgtcttgcgatggcgcatcgctatgcgctctccccgcgcgaaaccgaagtgttcgtgctgctggctcagggccggacgcgcgccttcatccaagacgagcttgtgttgtcgagcagcacggtgaaaacccatgtgagccatatctacgcaaagatggaggttcacgatcgccaggagatgatggatctcatctggcggggcgatgccggtttcggtctggccgaagcctaaccttttgatccgacctggctcgaaggcgaccagatcccagcctctggttcggcgtctagcggcacgcctcttcgatgaacttgcgcaattcgtcgatgccgatgcctttttcggcggaacagggaatgactgtctggcctttcgggaggcgcagctgcttgcggagagccgccacctgcttgccgcgttgcatgttggagagcttgtcggctttggtgagcgcgatgacaaacggcagacccgcttcgcttaggaattcgaccatgccgatatcgaggtcggtcgcggggtggcggatgtcgatgagcgatacgacgagcgcgaatcgacgctcttggttgaaatacccttcgatgagttccgaccagcgcgccttttccgatttggcaactttggcgaatccgtatcccggcagatcgacgaaatcgacgttttcgactgagaagaagttgatggtcgaggttttgccgggaaccgaggataccttggcaagcgctttgcggttgaagagcttgttgagcagcgatgatttgccgacgttcgagcgacccgcaaacgccacttcgggatgttctgatggcggcagctgttctgaggtgccgtacgctgccgtgaatgctgctgtgttgtagttcatcgtctgccttcggtcgggtggcaccgcttcgtgcgctgcgctttgtttcgagatgtttcagtataggcgatcggaggcgcgctgccaaaggaaccgtcgatccgaagcgcccggttcggattcggcaggacatgaaggcgattctgcttggagccgccatccccctggcggctccgtttcttttgcgggccttcttgcgcttcgctgcgatccggtttcgcatcgctcgtgtcggttctctgttgcccgcttgcattcccgcgtccgaatgctatactttgcaagtttctaattacacatgctcgtgcgacccggcaccgccagtggccaaccgaaaaaggctgcgggactggggaagaccgcgggcagaggattaacgaatggagagaacatgaccaaggtcagcattaaatcgctgcttgatgcaggcagccacttcggccatcagacgcgccgttggaaccccaagatgaagccgtacattttcggcagccgcggggatatctacatcatcgacctcaagcaaaccctcatcggactcgacaaggcctacaccttcatttccgaaactgctcgcaagggcggtaccgtgctgttcgtcggcacgaagaagcaggctcaggaggccgttgccgatgctgcgaaccgctgcggcatgccgtatgtgaacgcccgctggctcggtggcatgctcaccaacttcgtgaccatccgctcgcgcgtgacccgcatggaagagctcgaggccatggaggccgacggccgcatggagcttctgcccaagaaggagcagattctgcttcgcaaagaacttgccaaactgcagaccaacctcaacggcatccgcaacatgaagaaggttcccgaggccgtcttcgtcatcgacaccaaccgcgagaccatcgccatccatgaagcccgtcgtcttgacattccggtcgtgggcacgctcgataccaactgcgatcccgacgacgtggattacggcatccctgcaaacgacgacgcgatccgttcggtgagcttgctcgccgagttcatcgccgatgccgttatcgctggcggcgttgtgccggtgaccgttgccgatatggccggcgaagcccaggaaaccgccgtcgaggcagaggcggtcgctgcgatcgccgagaccgaggcggaagctgcggttgagaaggttgccgctgacgccgttgtcgccgaagccgccgtcgaagctgccgcagaggcggaagttgccgccgaggcagccgaggaaaaggctgccgagtagcgcttcgctgcgattgaaacgacacgacccgggcgcgaatgcgatttgcgccccgtttgatcgagaaaggaaacatccaatggctgagattacagcttctatggtcaaagagcttcgcgagatgaccggcgccggcatgatggagtgcaagaaggcgctcgtcgaggccgagggcgacatcgagaaggccgtcgacgttctgcgtacccgcggactcgccgccgttgccaagaaagccggccgcgccaccaacgagggtacggttatggccatcgtctccgatgactgcactgccggtgccgttgtcgagttgaactgcgaaaccgacttcgtgggtatgaacgacaagttcaaggcctacgctgagaaaatcgccaaggctgcgcttgccgcgaagcctgccgatctcgatgcccttaaagccgtcgaagtcgaaggcgagacggtcgaggccgttgtgaccgacgccatccatacgcttggcgagaacatccagctttcgcgtttcggcgttgccgaaggcggtgctgtttcctcctacatccatggcggcggcaagatcggcgttctcgtggagttcgacgttgagggcatcgatcccacgtcggtcgagttcgcgcagtacggccgcgatgtcgccatgcaggtagccgcggcatccccggttgccgcgaaccgcgatgccgtcgatccgagcgtcgtggagcatgagaaggccatctacatggctcaggcggccgagtccggcaagcccgaggccattcaggagaagatggcgacggggcgcttggagaagttcttcaaggagaacacgctgaccgagcaggcatacgtgaaaaaccccgaccagagcgtcgcggagtacactgccgaggttgccaagaacctgggcggcgaaatcaagatcgtgaacttcacccgcttcgtgctcggcgacgccgagtagcttcaagcttcattcgctgaaccgaatgccggcggccgtttggctgccggcatttttacgtgcgcggcttcgactcttcggtgcttttgccttgcgggcgttcgtgtctggcggtgtggatgtcgtgagcgaatgctgcgaccgtctgggcctgtcggcgcgaatgctcgagcgggcgtctcggctccgccgagcctgcaaatgacagaagagggttcaaaagtggctgaaatttacggtttgggcaattgaagacaggattatcttctgaatgaaaaatcatgacctgcagatatgctgactgatgatcaaataaatcaaagactgccgatgccatgactgcccaaaccgtaaatttcagccactttcgggattttccctgccgaaacagcggggtctgccctgtggtttctgtttcggtcgaattgccgcgatggttctgcggcttcgccgggtttcggatccatgcgggcagcggacggtgggcggcggtcggtgagcaatagaggccgggcagcggacagcaacaggcgacggctgggcgatgattcggcgggcgacagacggcggcaggcgacgggcaggcggcggccgccgaggttcgagccgtgtcgggccttctggttcgagcgtgctcggatcgggttgggcttatcgacgtttgcttcgctgcatcgcgcgagcctgctccagcatggtcggctcctgaacgccgaagcgcggatgcatcttgcatgcgcgcgcaagtccgtttcaaggcaccgttgaatccctctgctttcgttgtggatgttcgatggtagggcatgcgcatgtgcggcggttcttttatggtggatgaggacttttccgaacagaaagacggggttatgccagaggaaatcatcatcgtcaggggaaactcgaagcttgcgggtacggttgccgtatccggtgccaagaactcggcgctcaagctcatggccgcatcgattctcggccaaggggtttcggtggtgcataacgtgcctctcatttccgatatcaacataatggccgatgtcatcaggcgtctcggtgctactgtcgagcgcgatgggcatacgctcgccatcgacgcgacgaacgtgacggaatgcgaaaccccctacgagctcgtatcgaagatgcgcgcgagcatctcggtgctcggtcccttggtcggccggttcgggcgcgctcgggtcgctatgcccggcgggtgtcagatcggcgcgcgcaagatcgatatgcatatgatcggtctcgaggctttaggcgtgaacttcgaaatcgatcatggattcctggaggccacgactccgaacgggttgcacggcgctcatgtcgtactcgagttccccagcgtcggcgccaccgagaacatggtcatggcatcggtcgttgcggagggtgcaaccgttatcgagaacgctgcgcgcgaacccgagatcgtagatttggtgaacatgctcaacgccatgggtgcgcgcgtttcgggcgcaggttcgtccatcattgaaatcgagggcgttccgcttcagtcgatgcacccctgcgagcacacgacggtcggcgaccgcatcgaggcgggtacgtttcttgcgggggccgcgcttgtcggcggtcccgttacggtgacgggcatcgacgcttcgtttctccgcatggctctcatgaagctcgacgccatgggctgcgagatcgaagtcgacggcgattccatcacggtttcccgaaccgagcccatccaggcgatcgacatccagacattgccccatcccggctttccaaccgatctgcaggcccagtacatgctgctcgcctcgcttgccgaggggaactcggttatctcggaaaacgtattcgaaaaccgcttcatgttcgcgtcggaattggtccgcatgggggccgatatcacgatcgaagggcatcatgctctcgttcgcggcgtcgaacggctgcagggcgcaccggtctcgtcgaccgatctgcgcgcaggcgccgctctcgtcttagcggggattgccgccgaaggcgaaacccatgtacacgagatatcccatatcgatagaggctacgaggattacgtgggaaagctgcgatccctcggcgccgatgtcgaaaggacggttcttccgtaagaacccgtccgccatagacgttaggatcaccgaatggcgtacaaacggaggaagatttcggcttcccattcgaaccgtacgtcgcgtaagctgcgcgacgccaccataggcacgcacgtgccgtcgagcgctcgtaaaacgcccggccgcgcaagcggcagctccgtggagttttcgaacccccgcaagtcggtgcgcgcgcagcgcggcatcgtcgaccacgtgctgccgacgacgtcgacgcgcgaaagcgattcagcctattcgcgtcgcgtttcgcaacgcgatttcgccgatggcatccagaggaaggcccgcttcaaaggcatcgcaatcgcccttgccgtcgtgctgctggtcgtttgcgtggcgggaggcgtcggcatcgccgcgtatttcgggtcggtatccgacaagatgagcctgggcgattccaatgcgaaaagcgctctggtcgcccctgcggaaggcgacgctccctatacgttgcttgtgggcgagttttcgcgggcgggacaggattacgaaggccccgatatgctcatgctcgtccgcgtcgattccgaaagcaagcaggttaccctcgtgtcggtgcccgctaacgcgcaggtgtcgttgagcgacggcaatgcgcatcggatcgccgatgcgcagctgctcggggtagacgaatatctcgtatcaacggttgcgagctttacgggcgtgaacgtttcccatctgatcaagaccgacgccgaagggcttgagagcctggtcgactacctgggaggcctgacagtggatatcggccaggaggtcgacgatcccaatgcgggggacacctacatccccgcaggcacgcaaaccctcgatggcaaaacggtgctgacgctgtgccgtgcgttgaactttgccgaaggcgatgagacgcgcgccgaaaaccagcagaaagtcgttctcgctttggctgagaagctgcttcaaaccaatgccttcagcatcatccccacgcttgacgccattgcggggacggtgcgaaccgattattccgcatcggatgccatgggcctcatcgattcgttaaggggcgtagatctgtctcgggtgcatgccgtgcggatgcccggttacgctctgacgagttcgacgacgggcgcagagtacttcattgcgtctgaagacgagtgggcggccatgctcgaggccatcgaggcgggcgaggatccgactcccgccgacgagaccgccttgtcggtcgatcctgcgagcttcaagataaccgtgcgcaacggctcgggcatcacaggcggcgcccagcagatggccgattcccttgccgaaggcggcttccaggtaaccgaaaccggcaacgccgatcagtacgtatacaacgaaacgctggtcgtgtaccaggacgacgcgtacaaggaagcggcggaatcggttgtgaagtatctgggcacgggtcgcgcggtgccttcgaacggattctacgcgttcgaaaccgacgtgctcgtcatgcttggaaaagactggcagccgctgaattgatccgcttgccgcactcggggccgcacggtcttcagtgtgctacaatcgatcggaacgctaaccgtagaagggatttgcatcatggtagaaaagaacgatgtggccgcagtgctcgagcttatccgtccgagcctccaggctgacggcggcgatgtccagctcgtcgacgttgcggaggacggcactgtaaccgtcgagctgcagggtgcctgcaagggctgccccatgtctcagatgacgcttgcaaacggcgtcgagcgcattctcaaagagcgcgtgccgggcgttaccaaggtagtacccgcggtgtagccaatttatcaccgcaaacgatagaagagacaagaaaggtcggcaggaacatggctgtatgctgggagatgcggggctgcgatgacgagatgcaatcgcggtgtccgcacaatcaaccgggcgagccgtgtcctgccgactgccattacgcggcatgccatcgcgaaacgcatgccgtggcaaccgatttcgagcttctgctcaaccccgaacttgattacgaggcttccgtcaaggaggtctgccggttctgcgagttcttcttaacgaacggtcccgcgcatgccgatcgcacgggcgactcttcgcgccaagggaatcccaatcgtttccttttgtaaggcctgccttctgctacaatgtgcctaaagcacggcacggaacgatggcgtacgaagggagatgtgaaagcgatgacggcaaagctgacctgtcccgcttgcggagcaaccgatctcgatgtatgcgaatacgattccatgatggtgctgagaaaggataccgctctgttttccctgcattgtccccattgcggctctgcggtttcttcggttcacgcgattcccgcgcagttgcgcgaagagataaagttcgcggcgatcgaagtgggcgccggcatgggcgcggggcagtaggctcgactcctttcgacggatgctgccgcgtgcggtctgttttccgtttggatggtggaatgcgacgatgcgccgcttgatgcggcgctttttattggaggaagcatgctcaacgaaatctatcagagtctcgatccgatagcgttctcgttcgggcccatcgtggtcagatggtacgggatcgcctacgtgctcggtttcgtgtgtgcggcgttcgtgatgtatcgggtatccaagcgctggaaggttcgcatcgacgccgattccctcatcacgatcatgttctgcgtgatcatcggcgtgatcatcggtggcaggctcggctacgtgctgttttacggcaacggaagctaccttcaaaacccgcttgagatacttgcgttcaaccatggcggcatgagctttcacgggggacttatcggtgctctggttgcgggagtcgtggcggcaaagctcacgaagatcccgtatctcacgctggccgatctcgggtgcatcggtgcaccgatcggcctgttcttcggaaggtgcgcgaatttcatcaacggcgagctgtggggtgcgcccaccgacgtcgcctggggcgtggcgttcggcggcagcgcagggatgatgccccgccatccttcgcagctttacgaggcgatactggagggaatcgtcttgttccttgtcttgtaccttctgtcgcgcaagacgccgccgcgctctcgcggcacgttcctcgggattttccttattatgtacggttgttttcggtttgtcatcgagttcgtccgcgaacccgatgtgcagctaggatatctgtggggcggatggctcaccatgggccagctgctctcggtgcccctgatcctcgtgggcatcggcgtgctggtttatgcgattaaaatgaagctgcctcaacagggacttccagaattgccaccagtagaatagcatataagaaaagacgaaaaccaccgaggaggaaaccatggacgttaagttctatcgttgcacccattgcggaaacatagccgtaaagccgttcgattcgggagtgccgctggtctgctgtggcgagaagatggaagagatcaccgccaacaccgtcgacgcggcggtcgagaagcatgtgcccgacgtgaaggtcgatggcgctaacgttcacgtgcaggtgggaagtgtgcttcatcccatgacgccggagcactacatcacctttatctgcttggtgaccgagggcggttaccagatcgtcgaactgacgcccgagagcgctcctgtggccgatttcgccgtagccgaaggcgataagccgctcaaggtgtacgagtactgcaaccttcacggcctgtgggtcgccgaagtctaatcagacgaattcgtttggcgccggcggctcttcggagccgccggttttgcgtttatgcagggtttgtggggtggggcaggcctaatgacgtgccgaagacaagaggcaagcagtgtgctatcatagataggcttgtcttcgccttggtcggaaaccaaggcccgtaaaggagaaaccaatgaaacaaggaattcatccggattatgtcgactgcacggttacgtgcagctgcgggaacacctggcagacccgctccaccaagcccgagctgaggatcgacctctgcaacaagtgccacccgttcttcaccggtcagcagaagttcatcgataccggcggacgcgttcagcgctttgccgataagttcggttctgccaaggaagccgttgcagcacgcgaggccgcaaagcgggcagagcgcgcagccgccatcgaggccgccgaagcagccaagaaggccgagcgcgaggcgaaggcagccgagaaggccgcccgtgccgccgagttcgccaagaagtcggaagccgaggccgcaaaggccgagcaggaagctgttgcgggcgaagcggaagccgctgaggccgttgccgaagaagcagccgaggccgttgccgaggctcctgccgaagagtctgccgaatagtagcccttcgagggcgtttgcccaaatcgcaggctgtggcagcatgagcgtgtaaaagcgagcgccgacgggaatccgtcggcgctcgttgtttcaggggcgtgcccatggtagccgtttttttgcgtgcttgctccgagaacccctgcgttaggcgcgaattcgcagacgaggggattgtgcacgcagcgcttctcgcgttgcgctcaagccgtctttctaatccgtccgcttcaccgtcatcatgcgcagcgcttctccgaagagcttacctgcaccggacatgaccgcaaaccgcagcttttcgggatcggcgacaacgctgcccgcgagggtttcgacgccccagtcgaacaggaagggcgaggctacgacgctcggtccgaccataacggtcgtggcgttttcggtcagatcgagcagcctcggcgccgtcttgttgattatggtcacgccggtgatgaaggcgtagtctgtcgaggggagcacgtattcgcaggccggatcgggggtgtcgagggcctgggagcagttgcgttcgagcacggtgagctcggcgctttcgccgaggcgttcgacgttggggaaatgtccgatcacggtaaccttcttgcccgccatttcgggaaggtacacctcgaaggcatccatcttatgcgtggtgccgtcgggcaactcgatggcctcgtcgtagacggcgccgagtgggtcgagcagctcggagcgcgaataccaggcgttgagggcggctactccaagcgatgcctcttcgaagcaccatgatttcgatagttcggcgacggttctgaggggcatcccccgcaaatcgcaagtgaaggagcgccgcgctcctcccttgcaggtgaagctcacgcccatgccgcagtcggcttcgacataggaccagtgcgtacccaggcagtagtcggtaacgtggatgtcgtcggggatatgggcaatcaggtggttgtagaacttccagggcgtcgcgtggtcgtaggtgccgggaaaggcgatgtcggtttgggtcgggctcgaggcgcagcaatctttttcggggcatcccatcggttctctcctgtcgtttcacatcgtgtatcaagcgcgcggaaagagcgcgcgcattgtctccaatgcagtataatactccgaaagcgatgcgagaggaactcttcgatgctctttatcctgacagggggcgtacagatagggaaaacccgctggctcgagcagcttgtcggcgatcttgcggctgagggcgtctcgtgttgcggcgtgatcgcacccggtgtgtggcggcttgcacgcgatgccgaagtggcgggcgccgatcgggcgggaagcggagcccgcagcttcgatggcgcgggcgatgatgattcccgcgtgcgcgagaaggtcggcatcgacaacgtcctgcttccgcaaaacgagcgcattcgcttcgcaacccgtcgcgatcttcttcctggaagcgcttgcgggtgcgcggaagggcgctcgcagccgcccggtgacgaagggatcgggctgcgtgcgacttctcaaagcgataaggcctctcttggttgggctatctacgacgacgccctcgcccgcgcaaacgagcacttcgataagcttcgccgtcgcgagcgcatcgaaggcgttcggaattccgaactgctcgtcgtcgacgagatcggacgtctcgaattggagcatgggcgcgggctcgtctgcgcgctgcgggttctcgatgatgggccgcagccgggcatgcctcatgcgcttgcggtggtgcgtgattggctcgtgcccgatgccgagcatcgattcgggacaaggtggggcgagcaggttgtgatcggacccgacagcaggggaagacgggcggtcagaaacgctttcggactcggctcctgaccgcgtttcaccgccggtcttttgccgctgtcgcaggatgcgccggggccgacgggtcggcgtctttcaccccgatcagcggaatgcccgagcgcagcagcgcgaaccacgagatggccgcgacggccatcgagagcacgatgatggcccctacgcccacgatgtaattcggccagggcagcaccgcaagcaccatccctgcacatccgatggccgtgtgggcgaaattgatgagcgatgaagcggcgcccgtgtcgccttcctgctgggataaaaggatgttcgtgctgtacggccgcacgcacgcttccatgatggcgaaaacgagaaacgtcgcgcagaaaagatagggcgatatctctccaaccatcatcattgctattcccgaagccagggcgatgacgatgatgatggtcgtgaaccggcgcgcgctgacgtagcgcgatgccttgagccagatgagcggcccgattgcagtgagcagggcggcgattgcgaagaagtagctgtattcgagctcgcttaggccgaagaacgtgatgtagatgtacgatcccacggcgatgtaggccatgaacggcagattgtacagccctacgatgcacagaaacgaggtgaagcccttgttcttcgctacggtgccgagctgggcgatgcttccgaacaccgtgccttggtagcgtgcttgcgttggaagcgtttctcggtagagcagggataacaccgcacatacgagtccgattcccgagagcgtccaaaacgtcatgtgccaatcggcgacctgcaagatcaaggcgcctacgaccggtgcgagtacgggtccaaccacgaacatgacctggactatggatagtatcgcctcgcgtttttcgggaatgatggcatctttgacgatggcggtcgatacggcgctgaccgctcctgccccaagcgcctgtacgacgcgcatgccgataagcatccagatgtcaggcgccatcgcgcacagtgcgcttgccgccgtataggcgagcatgcctgcgagaagcacgggtttgcggccgtagcgatcgctcgtcggcccgaatacgagcagcccgattgcgaagaagaggtaatagcctgcaagcgtcaggttgacggtgcccgcatcggtttcgaagtactcggtcatgtggggcacagcgggcgtgtacatatcgagggaaagaggcgtcacgaggctcgtgacgacgagcagggcgacaagcccgaagggtccgagatatttttgcggttggacgagccaccggttcatgttcacagaacatctcctcctgttcagagaacgcgacccgattaggggattacaagggaggtactttagcgaaacgttgcgcttgcaccgcgggatccgccgatcaccataaagacaccatttcttcatgtatggtaaacgagcagatgagaggcttgccgacggcgtttgcggacaatcgcatgctagaatacgaggcagtttgcttacggttaggggtgtgcggcgatgaagaagctcggaatactcgggggaatgggtcccgaatcgacgcttttgtactacgagcagatcgcgatgcggtacaacgcccgttttgcaacggggatgtttcccctgatgacaatcgaggcgctcgacatgtacgaagcggtcgggtactgcaaagcgggcgagttcgacaagctgctcgactacttgctcaaaggggttcgcaaccttgaggcggcgggcgccgaagtcggcgtcctcgcctcgaacactccccatgtggtattcgacgagctgcagagccgtgcgaagatcccccttatcagcatcgtcgaaacgacgtgccgcgccgtcgcctcgcgggggttcggcagagtagcctggctgggaaccggtttcgcgatgggtcatccgtactttaaagaggcgttcgcgcgccgcggcatagaggcggtatcgcccgaggggcgcgatcttgagcgaatcgatgcgatcatagccgacgagctggagttcggatagatcctcgaagaatcgagacgcgagatcgatgccgtgctcgagaagatgagaagagaatcgggcatcgaggcggccgttttgggatgcaccgagctgcccctcatgtacgccgatgcgcttgcacctgtttttctgttcgataccgtcgagctccatatcgacgcaatcatggattacctgttcgaagacaactgaaaggaccgacaatgatcgacatcgacgcgtttcgcagcatctcctacggactctatctcgtctcctcgcgtgccgagggggaatcggccggatgcacggtgaatacgtttgcacaggttacatcggaccccttgcaggtgagcgtggcggtgaacaaggaaaaccatacagcttcgatcatcgaacgatccggcgcgtacacggcggtcagcctggcgcagagcgcctcgatggagctgatcggcaagttcggcttcttctgcagccgcgatgtcgataagttcgaaccgttttccgtgcgtaccgacggcttcgggtgcccgtacgttgccgagcaggcggtggcgcgcttttccgtcaaagtgaccgattcggtcgaccttggcacgcatacgctgttcattggagttgtggtcgaagccgagatcctttccgacgaggaacccatgacgtatgcgtactaccacgccgtcaagggcggcaaaaccccaccgaaggcctcgagcttcatcgcggaccgtgtcggggacgctgcggcgggaagagtcgatgcgaacgacgggtcaggatcggctgcttcgcagggcgatggcgcgggttctttttcggccgtcgatgcatcgacggcgaagcgggagggcgtccgctacggctggcgatgcaccgtctgcggccatgtcgaagaggtagacgagcttcccgacgatttcacctgcccgatttgcggcgtcggcaaggagatgttcgagcgcatagagctgtagcatttgcctcgcgaagattcggaaacggaaagccctggcaaaccaagccgtgcgccagggcttctttttgccgtaacgtccgaatgcccgctgcgcgtgcgacggtttctagcgcgcgtcccacgccaagaacgcccaggtgacgatacgtgggtaatcgagcttgaacgctttttgcggcagacccttcttgtcgggattgcccgcatcggggttggcgacgaggtgcgcatcggtccaggtgcgcaggcggtcgagcgccgcggctgcttcgggcgactccttgtcggccatggcgtcgagcgtcatgcgcgaaaaatcgtcgtaggcctcatcgacgctatcgaacgtatcggaacgcgtgcttttgatataggccacttcgggcatgatgcactcgccgacgagaatgttgaatgcatagaggaaatcgttcccgaactggttcttcacgccgatatcggcaagtatgcgctcgtccatgcgtggcgacgaacccgttgagagggtgatgcacacgcggcggcgggcaaccgaggtcaggcgcatgagcgcggccttcatgtcggataccgcgatcgaacgcgatgcgagggccacgtcggtcatgccttcgtgaactccatgggcctcccaatcgtcttcccagctcatgagtttcggaaagacggtagtcacgcccttttcgcgcagctccgcctccatggcgtcgagcattccctgcgagaagtcagccgcgaccaccttgtggccctcttcgccgaggggtaccgacagggctccggtgccgcatcccatatcgaataccgtttcgccgggctcgatgcgcgcgagctcgaggaagcggtcgacgtaggcgttcggggcgtctttggtggaaaacgtcttggatcttttatcccaatactccgagttgtctgcctttcggcgggcgatttgcaggcgcttccattcttcgttccagtcggtcgcagaaagcagaggtgtgaagttttgcgtcatggggtccctttcgccgttcgaagcatccaagttcaagtactatactagcaaaccgcgattcggttcgcattcaagggccgaacaatcttttgatccgataaggagcgtacgcgctaatgcaagtcgagcttctctaccatacacccgatcccgaacgtgccatcgccacagcggcgcggctctgctatgcgccggtgggcgcttccgagctcatggaaaccatgcccgaagatcgggtgcaaagcgtgctttcgacgatcatggagagcggccatttctcgacgctcgagcatgcgagctacacgttcgccgtcgacggcgtgtcgcgagcgcttacccatcagctcgtgcgccaccgcatcgcgagcttcaaccagcaaagccaacgctacgtgaaatacaccgagggcctttcggtcgtcaagccggaaaccgtggctgcaaaccccgaaaccgagcgcgtcttcgatgaggccatcgatgctgcgctgtccgcttacgcgaagctgctcgatgcgggcgttcctgcggaagacgcgcgctatctgctgcccaacgcggccgaaaccaagatcgtcatcactatgaacgtgcgcgagctgctgcacttcttcgggctgcgctgctgcaaccgcgcgcagtgggagatccgcgcaatggccgatcgcatgctcgagcttgcgaaacccactgctccctacatcttcatggatgcgggtgcgccctgtatccgcggtgcatgtcccgaaggcaagatgacatgcggaaacccgtttccgcgtgtgaagaggggatagcatggccgagaaaaagagcgacctttcgcgcgcattcaaggaagacggcgcgctcaaaacgcacgtaggcggccaggcgctcatcgagggcatcatgatgcgcggcaagtacaactggtcggttgccgtgcgcgagccctcgggttcgatctacaccgaagagcacgacctcaattcgggcaaagacaggaacggctggatgtactggccgcttgtgcgcggttgtcgggcgctcgtcgaatcgctcgtgctcgggtacaaggcgctcgagatcgccgcgctccatgcgttcgccgaagaggcggacgagaaggacggtgcgaaagacggcgtcgaagccgccgtggtcggtgctgcggctgccgaggagccctctgcgaaaaccgatgtcgaagcgatcctgcccgatgccgtgcccgtcgaaggcgatgggaagccgttctcatggaaagacgatttcggtcgccctgaaacgatgatcgacgcactgggcgcccagaccgagctcaaggtcgaaagcctcgaggcgtctgcgcgcgagcatgccgaacgcgccgagcggctggcggtcgccgaggaggcgctgctcgaaggagagttcgaacagcccgaaggcaagcagaagaaatcgttcatggacgaggaggtcgaattcggtaagaaggagatggcgatctccatggtgctcggcctggtgctcggcgtcgtgctgttcatcgtggcgcctgcgttcatcacgaacctcatcgtgggagaatacgatcagaacacgcttctgtggaacatcgtcgacggccttctgcgcgtggcggtgttcgtgttctacatctggctgatcgggcgtatgggcgagatcaagcgcatgttcggataccacggggccgagcacaagaccatccactgctacgagcacgggcttgcgctcactcccgaaaacgcgcggagcttcccccgtttgcacgtgcgctgcggtactgcgtttctcatcatggtcatggtcatcgcgatcatcgtgtacacgatcacccccttgaacgcgctcatcgaggcgctcggcgtgtccgatggggcgccgaagctcgtgctcgtcattttcgtccgcatcctgctcatgcccgtgatcgccggcatctcctacgagatcacggtaaagtgggcgggaagccatccagacaacccgcttgtgaaggtgatactctggcccggcatgcagatgcagtacctcaccaccaacgaacccgacgacggccagatagaatgcgccatcgccgccatgcagctcgtgctcgagcgtgagcaagcggaagatgcccgcgctgcctccgcagacggcggcgcgcgaacgggtgcaggagtcgaggcctcggcgaaagcgtagccgttttcgccgaggttcgcgttcgccgcaggtttaagcgcagtgatctatctgggtaaattcgcttcctgccgataaaacttgatcgatggggttataatttcgagcatcggttttacggcgacggagggacgtatggctactgacgacgagttcgagttgctcaaccgcctggttgaggcgaaggaccgcgagcttgaaagcgtattcgatctcgtcgcggatggcatcgggaaattcgcgtgcaacgacgagttctcgattctctattacaactggggtcttgccgatctggtgggcgcagatcgcgggttggtcgaatcgcagggtttcgacagcagcctctacatctacgaagaggactatccgaagcttcaggccgctatcgcgcaggccatcgagcgtaacgagccgttcagcgttacgtatcgtttgaagcataccgacggacggttgatctgggtgaagacgaacggtctgctcatcgatgaactctaccaggacacctacccgatcatgtatttgttctataccgacatcaccgatatcgtcgagacgagcgagcggctcagcatcgagctcaaacgccatgaagcgcttatggcgcttaccggcgagatgttcgtggagtacgactacgttgatgacgagttgctgctgctcggcgagtttccgtcctattacgacggcgattcccgcatcgagcattacagcgattttctgttcgacccggccgacgatgctgattcgacggtgtttcgcgagctgtaccggctgtttcgggagggcggcgacgatttctccgtggagcgaaggctcccacggaaagacggctcgatggcgtggttctcgatcggcggcaagcgaattttggcgggcgacgggtcgccgcgcaaagttctctgccgcattaccgatatcgacgagcgcaagaagcgcgaggaagcgcttgaaaagagcgcgaggacggacgacctgacgggcgtctacaaccaaggtgccgtctatgcgctcgtaatcgatcggcagaagagcatccagaaggacgagatatcggtgttcatgatgcttgatttcgaccacttcaaagagatcaacgatacgttcggccacccgctcggcgaccgcgtcctttccgagggcatggctgtggtgcgaagcgttctgcgcgacgacgacattgtcggccgtttgggcggcgatgagttctgcctgtatatgaggaacctgtcgagcactgaggaggccgaggcgatcgcatcccgcatctgccgggcggttacggctatggacggcatggccgaagtcggtgtgacctgcagcataggcatgagctcgagcgtgggcggcgataaaacctacgacgagctgtatgctgaagccgacagggcgctctacagcgtcaaagaggcgggccgcaacggcttcgggttcagcgtctccgaaggatagcgctgtcggatcaagcgccgagcggcttgcgggcgtgccgtgccgcatctcctggccgtatcgcaggcgattcgccgaacggttcgcgggcagcgtcatccgcctgcccgcccgccgaacgggcccgttcttgcggcgtgaccttgcacgtcccgatacagaaatgcaaccgtcaagcccccgttaccaaacgagctttgcattggcgatacaatacggccatgcgttttcgctgttcgggcgggagcgccgtgtttcgaaggcgggcagcggccctgcgcggcggccttcgtccgaaacgcggtcggacgagtgtacgggagcaaacatgatatcagttcgcaacataacgaagaacttcggcaaggtcgaagcgcttaagggcgtttcgcttgaagtcgaagagggggagaaagtcgtcatcatcggtccttcggggtcgggcaagagcgtgctcatacgctgcatcaatgctcttgaaatccccgattcgggagagatcgtcgtcgacggcatgaacctttcggatcgaaaggtcaattctcgagcgctcgcccgtgaggtcgccatggtgtttcagagctacaatctctacccccacaagacggtgcttgaaaacgtcacgcttgcaccggtgaaggttctcaaagtgaacaaggccgaagccgaaaagaccggcctcgcctatcttgagcgcgtgggactttcggacaaagtcgataagtaccccgaccagctttcgggcggtcaacagcagcgcgtcgccattgcccgcgccctcaacatgcaccccaaaatcatgttgctcgacgagccgacgagtgcgctcgatcccgagatggtccaggaagtgctcgacgttatcaaatcgcttgccgaaaccaacatgaccatcgtcatggttacccatgagatgggccttgcccgcgaagcggccgacaaggtcgtgttcatggaaaacgggttggtggtcgaccagggcactccgtcgcacatattcgacgagacctccaacgaacgcatccagagcttcctgtcgaagattctctaggcggtgcgcatgctgaccagaagagatttcatacgcatcacggcgcttgccgcgggaaccgttgcccttggcggcagccttgcgggttgcgccggcgacgacgtgctgcgcgtcggtacgaagatcgacgtgccgggcttcggattccagaaccccgaatcgggcaatatcgaagggttcgaagtcgatatcgcccgcgagcttgccgcccgcatcaagggcgatccgaacaagctcgaggtaacgggagtcaacgtgaccacgcgtggcatcatgctcgacaacggcacgctcgatgcgacgcttgcgaccttcaccatcacggaggcccgcaagaaaagctacaacttttcgcagccctacttcaccgatcacatcggtgtgctcgtgaagaagagcgcgggcatcgccgagctggccgacctcgacggcaaaacggttggcgtcgcttcgagcgcgaccacgcgtgacaagctcacccaagcgggcgacgagatcggcattcacatggagttcgccgaatacgccacgtatcccgagatcaagatcgcgcttgtcacgggtcgcgtcgatgcgttttctgtcgaccgttcgatcctcatgggatacctcgacgattcgacgatgctgctcgatgcgcagttcgcaccccaggaatacggcatcgcaacgaagaagaccaacaccgagcttgcggcccagatcgatgaagcgctgcagaacatgatggacgacggtacgctggcctcccttgaagagaaatgggggctcgaagatgcttgatgcgttcgcaccgttcaaatgggaagcgctgttcgcccgttggccggagatcctttcggctttcggaaccacggtgctcatatcgtttttcgcgcttatcctcgcgcttgtgctcggagtgatcttcggcgttttgtcggtgtctcgtttcgcgcctctgcgcgctatcacgcgcatctacgtggaggtcgtgcaaaacgtgccgctgcttctgcaggcgttcgtgttctatgcgctgctgcctctcataggcatcaacatggaaaccgtctacatcggcattttcgccatcggcatctaccacggcggatatatttccgaggtcgtgagaagcggcatcgggtctatccatcgcggccagttcgaagcggcgaaaagccagggtttcagctactggcaatcgatgttcgtcatcatattgccccaggccatgcgcatcatcctgccgccccttgcagtgcaggccgccaacctcgtgaaaaacacctcgatcctcgcgttcttcgtcggcggcgagatcatgtacttctcgaattcgtttgccggatccacgagctattacggtccggtctatctgatcgcagcggtgctgtacttcatcatctgctttcctctgtcgcgtttggcgctgtacctcgagcggcgcacccgttcgcataagcatgtgaccacgggagacgcgaccgagcacctggcgaccgatcccaccgaggtcacaccgggttcgcacgacatcacgggccataccgcggccgacagtctggccgccggtgtgcagacgatgcacgagaccgtggatatcgcaccggcggtcgtggcgccctccccgcgtcatccgctgcatgtgatcgtcgatccgggcgaccctgattcgatacggcgcgcctatccgcttaccggccgccgcgccgccgagatcgccgacgagataggccgcgagctgcaacagcagatcgaggacgagtgtgcaggcgacgaggcgtgcgtgcgcaggaagacgcgtacgaaagcgggccgcacgggagccaagcgcaagcttttggcgaagaagatcgtgcaggaggccgcggagaaccccgaagtggccgatgtgcttgccgagcgcatgacgaagggcgccctttccgtcgagcgagccgaggcgagcaggcgggctgcgcaggaggctgccgaacgggcgaatgcagccaagcaggaagccgcccaggtggtgtccgaggcgaaggaggccgtgaagaaggccgctgcggctgtcgagaactcgggccccctgccgaaggtcgccggtgggcaggctgctttggagaaagcggccgaagaggcggctctcggcgaggaggcgtttgccgataacgagtttttggcggatcacatcgcgacgttggagaagcttcatcgaagcctcggcggcgatgccggcgagatcgaaagcggcgttgccgaatcgggtgacggggagaatgcgcgcgatatcgagccgatcgacgcctcggggaccgatcctgaggatgcgtttgacggacggacgggcgttgggggcgctgcgggcggcaggagcgctggcgagggcggttccgctgcgcgagacaccgacggacgaggggaggcgaagtagccatggcagagctttttacctggattaacatgcgattcttgctgcagggccttggcatgaccctcgttatttcggctatcgccgtcgtgtgctccatcgtgctcggcacggtcatctcgatcatgcgcacgtcgaacaaccgcgtgctttcggccatcgcgaccgtttacatcgagatattcaagaatacgccgctgcttctgtggatcatgttcacgttcttcgtagcccagcttccgccgctcggtgctgctgtgctcgcgttcacgctcttcacgagtgcgagcgtggccgaaatcgttcgcggcggcttggccagcgtttcgttcggccagtacgaggcggcgaaaagccagggcttctcgatcgttcagacttatgcgacgatcatcttgcctcaggcgctgcgcaacatgattcccgcgctgctttcgcagttcgtgaccacgatcaaggatacgagcttcctctggggcgctatggcggtgcaggagcttatgggccgcggcatgattctcatgaacagctacaattcgaccgagcagattttcgcgatcttcggcatcatggcggtgctgtacttcatcgtatgcttcacgctctcccagatcgtgcgcgcctaccagcgcaagatcaagaaggagcgaacgagctagggcttcgttgccggttcggttgcgacatcggtcgtgtgcgacgatcgatgtcgccgccgatgcgatgggccgtgcggcaacaggtgctttcggcgggcgcgtgcttttcccgacggcgcgctcgcccgaacggtcaaacgcttgcctctttcgatggcgagcgcgctcgaacggcgagggctgcgattctatcgcttgcgcaaacgccgcccgcatgctccgggcggcgttttctgctactgaataggttccattcggaaaaagcacctcaaaatggcggtcaaggcaagcttctgcaggtgctggaggccgttttgcggcttttcggaccctgtacggctgtcgtgaaattcgcgacctgcgcaaacgccggaggaatcgtcgatcgaacgcgccagagccgacagaagcttgccttgaccgccatccaggcggcgtttttcgcagggaaagccatcgcggtcccagcagcatgcggtcccgcgcgtgcgggaccgttaacgcgcggttcctttaacatacagttcctcgcacacgtggttcctcgcacatacggttccccacgtgcggccgacgagccctcgtgtaatgcgtttctcggtgctcggctgcagaaccccggtgcccgatcgtcgcttaggctttatgcggcctggtcgaggtactgatcggcgtattggagataggggagataggcctgggccgactcggggatgcgcatggtgacgttttggccgtaggcgttgacggtgatgtattcggggtcgtcgtagtacgtgatggtgccgtcgatgcctgcgtagctgcccgacagcgagcctgcttcttcggctgcgttcggaagcacggcggcttcccagttttggatatcgaggctgtagacgatctgcgcgcagtcggcttcgctcaggcccgttgccgcagatatggagtcgaggttgtcgtgaagggcgttcgccgccttgtccttgagcccgcttacgtcgatgaacgcgttcatgctcgcggctctgatgccggcgatcggatcgttctcgtcggaggttgcgatagagggcacgaacatgatgacgatgattccggcgatgaggagcgcgatgaggccggtgaaggctacgatgacttttttcatggcgtgctcctttcgggttcggccttgcaatgtatgacgggtgccgccgttggtgtgtgtatgcgtcgtcgatactgctgttttccgggatgcgttctggctgtgtttggcaggtcgacggcttcccgttgccttagagtaatccaaaacggcccgattcatgaaatgtgcgccgtatcttcaacgggtgcggacaacatctctacggattaaccaaaactacccgataaaaaacaatgctgttgcatgggtcgaaaatcgtgtatgctaacaaactgttttggctcgaccgacgcggtcctcggaaaaagcggggaatcggcgcgtcgggggtcgaagcgatctgaccccgcacacgtaaataaacgcatggggatcgtgtggacgactatgcgccggacggtatccggctgcaagaacaggaggaaccgcgtgaaactggttgtgacggagaagaacgacgcggctcagaaaatcgccgatctgcttggcgcaagcaaacccaaagccgataaggtgtattcgacgccggtctatcggttcgatctcgacggagaggaatgggtgacgatcggtcttcgcggccacattctcgaacccgatttcgccccgtcgctcgtgtataagaaatccaagggatggcagggcgtgaccgaggaaggcgaggttttgcccgccgccattccggcaacgcttccgaagccccctttcaaaaagaagaaaccgtttacggtagacggcgtcgagctcaaggcgtggaagatggaggcgctgccgtatctggtatatgcgcccatcgagaagttgcccaaggaaaaggaaatcatccgcagcctgaaaaaccttgcgaagaaggcggactccatcgtgatcgccaccgacttcgaccgcgagggcgagctcatcggttcggatgcgctttcctgcatccaggaggtcaatccggacgccccggtgtcgcgcgctcgctattcggcgttcaccaaagaggaaatcaccaacgcgttcgaaaacctcgtcgagcttgacaccgatcttgcgtcggcgggagcatctcgtcaggatatcgatctgatttggggtgcggttctcacgcgctatctcacgctcgtgaagttcgctggatacggcaacgtgcgctcgtcgggccgcgtgcaaacgcccacgcttgcactcatcgtggctcgcgaacgggaacgccttgcgtttgtgcccgaggactactgggtcatcaaaggggcgttcggcgaaggcgacgatgcgttcgaggcaccgcacgagaccgcccgcttcaaagtggaatcggaagctcaggccgtcatggcgcacatcgagggcaagacgaaggcgaccgtcgaatccatcgagaagaagaaacgcacggttgcgccgcccgttccgttcaacacgacctcgctcatggccgccgcatcggccgagggcctctcgcccgctcgcacgatgcgcatcgccgaaagcctgtacatggacggctacatcagctacccccgcgtcgacaacacggtgtatccctcctcgctcgatctggccgagacggtgcagcggctcgtcggcaatcccgcgtacgccccgtactgcagggagctgctttcgaaagacaagatcacggcgacgcgcggcaaaaaggaaaccaccgaccatccgcccatctatcctacgaactcggcgacgcccgacgatttgcccgccgccgaatacaagctttacaacttgatcgcccgccgttttctcgcaacgctttctgaagcggcggtcgtcgagggcacgaaggtttcgctcgaagtcgggggagagacgttcatcggtcgcggagacgtactcgttaaacagggttttcgcgccatctacccgtacggcctcaaaaaagacgagcagatgcccgcgctcgagcaggggcagcagatcgccttcgggggcgccacctgcactaagaagcagaccgagccgcccgcgcgttacagccaaggcaagctcatccaggagatggagcgcttgggcctcggcaccaaatcgacgcgccactcgatcatcgagcgcttgtatgcggtgaagtacatcatgaacgatcccatcgagccttcgcagctcggcatggccgtgtgcgatgcgctcgataagttcgcaccgcacatcacgcatccggaaatgaccgccgagctggaaagcgagatggacaacatcgccgccggctcgacctcgaaggagacggttgtcaccaactcgcgcaatcttctcgccgatcagctcggcgagctgattccccattcggaagaggtcaaagaggccctcgccgatgcggttgcggcggacgccttcatcggcaaatgcccgaaatgcggcaaagacctgcagctgcgcgcatcgcagaagacgcggtcgatgttcatcggctgctcggggtggcccgattgcgacgtcacctacccggtacccaagggcaaggtcgaatcggtcgaagaaccgtgtccgacgtgcggcatgccccagatcaaggtgacggcgtttcgctcgaagccacgcatcgtgtgcatcgatccgacttgcgaaaccaatcatgagccaaacatcgaggtgggcgagtgcccgacgtgcaaggcccagggcaaaaccgcgaagctcatcgcgcagaagaacccgcgcactttgaagcgcttcatccgctgtgagaattacgaggagtgcaacaccggctacccgctgccccaatacggcaagctcaccgctaccgacgaagtgtgcgagcactgcggcgcgccgatggtgatcgtcaccacgaaccgcggtccgtggaagctttgtccgaacttcgattgtccgggcaaagagcaggataaagacgccaaaaagggcgcttcggcgaaaaagggcgccaagaaaagcaccgcgaagaagaaatagcggtacaatctacaatcgacaagaaccggaaggcggatgctctcgggcttccgcctttctcgtcgtcgggcttacggcttcaggcgacgtgggcgatacggaatacgaggagcgaaatccatggccaaggtaaccattgttggagcgggcaacgtcggagcgacggcggctcacatcatcgcatcgaagaatctcgcagacgtcgtgttggtggacgtcgccgagggcctgccgcagggcaaggcgctcgatatgatgcacatgcgcagcgtcgagaagttcacggtgaacgtgaccggcacgaacgattacgaggcgacgaaggattccgacgtagtggtcatcaccgccggcatcgcacgcaagcccggtatgacgcgcgaggatctgctcggcgtgaacgccggcatcatgtcgtcggtcatcgatgcggccctcgaggcgtccccgaacgccgtctacatctgcgtgacgaacccgctcgacgtcatgacctatctcgcttacaagaagtcgggtctgcccaccaaccgtctcatgggcatgggcggcgtactcgattcgtcgcgcttgtcgttcgcggtgtgcgagaagctcggctgcatgcccgaagacgtggtcgcctgggcgcttggcgcgcacggtgagggcatggtgtgctggcctcgcttcacgacggttcagggcactcccatcaccgagctcatgagcgaagacgacgtggaggcggttgtcgagcgcactgtgaagggcggcgccgaggttgtggcccatctcaagaccggctcggcttactatgccccgggcgcatcgatcgcgaagatggtcgaggcgatcctcaccgacagcaaagaggtcatgagcgtgtgctcctacatcgacggccagtacggcatcgacgatctctacatgaacatcccgacccgtctcggcaaaaacggcgtcgaggagatcgtcgagttcgatctgaccgacgaagagcttgcggctttgcgggcctctgccgaaagcgtgcgcgcgggccttgcgaacctgccggaatagcgaagggcgttcatgggcagaaccgttacagcgagagaggtggccgaggcggtgcattcggccattccccgccttgcctgggagcttccggccgacatccttgcaggccttgaagcggcgcgcgacgcggaggaaaacgaacgcggccgcatcgtgctggaccagcttgttgaaaacgcccggatcgcccggaccgatcgggtccccatctgccaagataccggtacggtgtgggtgagtctcgagatcggtcccgacgtggcggtgcaaggcgatgtcttctcgggcgtcgacggtgcggtcgcacgcgcatacgacgaggcccgtctgcgcaaatcggtcgtggccaacgcgattttcgatcgtgcgaatacaaacgacaacacgccggcgttcaccgacatccatccgatcgacgagccgggggcggcccgcctgcatatcatgctcaaaggaggcggctcggacaatgcgagccgcgtggtcatgctcgtgcccggcgcggggcgtgcgggcatcgtcgatgcccttgtcgagtgcgtgcgcgagaaggcggcgaacgcctgcccgccgcttgtggtgggaatcggcatcggcgcgacgttcgacaaggtcgcaggccttgcgaagcgcgcgctcatgcggccgatcgatgaggcggctcccgatggggagacagcggcgctcgagcgggaactgctcgaagccgtcaacgcgacgggcatcggcgccggtgcgctcggcgggctcagcaccgctctcgccgtgcgcgtggaaaccgcaccctgccacatcgccgccttgccgcttgcgatcaacatggggtgctcggccatgcggaggtgtaccgttgacctctaggaagctgacgctgcccctgtcgcgcgaagacgccgcaagcctgcaggccggcgatgcctgcttgctctcggggccgatgtacaccctgcgcgatgcggggcatatccgcctgctcgccgagctcgaagagggtggttcgctgccctacgggctcgccggccagaccgtcttctacgccggtcctacgccgtctgcggcgggaaggccgttcggcgcggtcggccccaccacggcttctcgcatggatttcgcggcacccgatctgcatcgggcgggcattgcggcaaccatcgggaagggcgttcgttcgcaggccgtgcacgaagcctgcaaggaaacgggttccgtttattttgtggcgtgcggcggtgccgcggcgtttctggcacgctgcgtggaaagttcggaaaccataagctatgatgagcttggaacggaagcgctgcgacgaatcgttgtagccgacttcccggtattcgtgggcatcgatacccacggcaacgacatttattcgctgtgatcagcggtgtagcttgaggaacgcattcgtggaacaagggaaacgacatggcggggcgcaaacccccggcatcttcataacgttcgagggaggcgagggcgccggcaagtcgacgcacatccgctttctcgctgaagcgctcgaaagccatggccgcgaggtgctctgcctgcgcgagcccggcggcacttcgataggcgaggatctgcgggcgatcgtgctcgatccagagaattccgccctgtccgatgaagccgagcttctcatctacgaggccgcccgagcgcagatcgtcaacgaggttatcgcccctgcgcttgcgcggggagccgttgtcttgtgcgatcgcttcttcgattcgacgattgcctaccaggtattcggacgcgggctcgatcgggcgttcgtggaggcggcgaaccgattcgcctgccagggcgtccgccccgacagaacggttttgctcacggtgggcgattgcgccgagaaggggcttgagcgcgccacccatcaggtcggcgccgatcgcctcgaactcgagggcgcatcgtttcatgcgcgcgtgaacgctgggttcatggagatcgcggcggcggagcccgaccgcatccgcatcgtcgcttcggcggacaggaaatccgatacggctcgcaaggtgttcgcggcgctttccgacatcttcacgtggatggcggatcccgcggtcgccgacgaggcgtttttcggcaaaatcgagaagagctactacggcaacaagaagtccgccgcttcttcgggcggcgatgtccgcggatcggaaggcgggagcctcgatggctgatgcgttcgagaacatcctcgggcaaccccaggtacgcgaatttctgcgtgccgcgattgcgggcggcaaggtgagccacgcctacctgttcaccggtccggccgggtcgaacaagacgcttgcggcgtatgcgttcgcccaggcgatcttgtgcgataaggcgggatgcggcgaatgcgattgctgccagcgcgtcatgcgcaagaagcaccctgacgtgcgctacttcgcgcccgagggtgcgggcggctatctggtcgatcagatccgcgatatcgtggccgatacgtcgcttgcgcccattcgcgcatcgaagaaggtctacatcctcgatcgcgtcgatctgctcagctcatcttcggcaaacgcgtttctcaaaacgctcgaagagccgccggacgatgtggtgctcatcctcttgggccgcacgcgtgaaagcgtgctgccgaccatcgtatcgcgttgccaggtcgtgccgtttcgccatattccggcaagcgaggcagccggcattctcatgcagaacacgggcgcgacgaagatggctgccgagatcgcgattcaggcgtgcggcgggtcgatcaccaaagcgctcgatttcctgaagtccaacgagcgcatgacgtttcgggcacgcattctcgaggtgctcgcctcgcttgcgcttgccgacgattgggatgtgctcacctacgccgaggaccttgtggtgcgtgcgaaggcgccgctcgacatcgttcgcgcggcacaggaggaagaacttgccgaatccgccgatttcctggcgaaatcagccatacggcaaatagaggcccgcaacaagcgggcgctgactgcgaagagcttcgaatcgcttcatcagatgaccgcgatcatacggtcgtggctgcgcgacgtccttgcggtgtgcgccggcacgcccgaactcgtgatcaacgccgatgtacgggcgagcatcgaagaggctgcggcgaaaaccaacgaggcgcgtgctgcggcggcgcttgcggcctgcaacagcgcggacggggcgttgacgtataatgtatcacctgaaacatgcctcgatgcgctgctgttcgagataaggagtgtactatatggtacgggtagctcccataaagctgcaatataatcccaggaccctgtggttcgatccgcaggacttggagattcgcaagggtgatccggtcgtcgtgaagacggcgcgcggcaccgagttcggccatgcggccgacgatatcatcgaagttgacgaggccgacatcaaaaagctcaaaagcgagctcaagccggttacgagaatcgcaagtcccgaagacgaggcgaaagccgccgagatgcagcgtaaatccgacgaggcccttcccctgttcaaggagatggcctccgaggcaagcgacgacatgcatccggtttcggtggagtacttgctcgacggagacaaggccgtattctacttcgaagccgaggagcgcgttgatttccgcgagctcgtccgcaagctcgcctcgcatttccatgtgcgcgtcgacatgcgccaaatcggcgtgcgcgacgaggcgcgcatggtgggcgggctgggccactgcggccaggagctttgctgcaagcggctcggcggcgagttctgcccggtctcgatccgtatggccaaggaacaggatctttccttgaacccgcagaagatttcgggtgtgtgcgggcgcctcatgtgctgcttgcgctacgaattcgatgcatacaaggagttcaaggctcgcgctcccaagcagaacgccatgatcgacacccccgagggccctgcgaaggtcgtcgagctcgacatgcccaaagagcttgtgagtctgaggacccaagagggcaagaccgtgaagatcccgcttgccgaaatggagacttccgagggcgccgcaaggcccgacaaggtgccggccgatgtattcgacgcctacgcgaaccgtaccgtgctcgacgcgctgaccgattcgctgctgataactccgcatttcaccggggaggacaagctcggcgatgcgaaggcgcgcaaatcgtcgaagagctccaaggggcgccccggaggatcgcagaagcagcgcaaggcgtccgaggcggcgaccgagacgaggaagccgcgccgcaggcgcagcactaccgtaggcgccgagggagacgcctcatcgggcgaggccaagaagcaggcaaggtccagccagcaagggcagcagaagaagaggtcgggccagaagaagaggtcgggccaaggacagaaccaaggacagaaccagaaccagggcaaaggccagcagcagaaaaagcagagccagcgccaggggtcgaaaggtgcccagaaacaaggtcagggcccgcgtccagggcagaagtcctcgggcttgcgcaacgccgaagcatcccatgcaaagaccgcgcccaagcagcagtccagcggccaggccgcaggcggcgaaagcgcgcatcgcaagacgcggcggcgcagccacaaggcgggaagcggcgagggcggcaacgcaacgggagcgaatccgaccggcggtgcggccggaggcggcaatgaatagcggcgaaacgtacgagtactccctcttgaccgacctctatcagctcacgatggcccaggggtattgggaatcggggaaaaccgacgatctcgcatgtttccacatgtactttcgcgagaaccccttcaaagggggattcgccgttgcatgcgggatgtcccagctggccgagatggtggagacgttcgcgttttccgacgacgatatcgcctaccttgcagcgcttccggcgccggggggaggaaggctcttcaagcagggattcctcgagtacctgcgcgcattcgaactcgatgtggacatcgatgcggttctcgagggaaccgtcgtgttcgccaacgagccgcttgtgcgcgtggtgggtcccatcatgcattgccagcttcttgagacagcgcttctcaactgcgtgaacttccaaacgctcatcgccacgaaagccgcgcgggtgtgcttggctgcggcggatgccccggtcgccgagttcggcttgcgccgagctcagggggcgggcggcggcctatgggcgagcagggctgcggttgtgggcggctgcgcttcgacgagcaacgtgctcgcgggcaagctgtacgggctgcccgtttcgggaacgcatgcgcattcgtgggtgatgtcgtttccgacggaaatcgatgcgtttcgagcgtatgccgaggctatgcccaagaattgcgttctgctcgtggacacctacgatgtcaggcagggcatcgaaaacgccatcaccgtgggactcgagatgcgcgagcgcggcgacaggcttgcgggcatccgcatcgattcgggcgatctcgcatggctttcgaagatggcccgtgcgcgcctcgacgaggcgggacttgcagattgcggcatcgtgctgtcgaacgacttggacgagtatacgatccagtcgctgcgcgaccagggggcgagcgtcacttcgtacggcgtgggcaccaagcttgcaaccgcgtacgaccagccgacgctcggcggcgtgtacaagctttccgcaaccaaaaacgcgggtgaaaaggaatggcgcgatcgcatcaagatcaccgagcaggcggtcaagctcaccgttccgggcgtgctcgacgtgcgtcgctactaccacgatgatgcgcgcctggcgggcgatatggtctacgacgtgaaccgcggcgtcaacaagcgcgagctcatcgtcgatcccgccgacagcctgcgtcgcaaagtgcttgcaaacaagcgctacgacacgttgctcgagccgcttgcgcgcgcgggcgaagccgtgctcgcgcaggatggccgcgatgccatgaaggcgcagaggcgcgcggcggctcaggtggcaatgcttgatgaaagccagaagcgtatgctcaatcctcattcctatcccgtcggtttggaatgtggtctttttgagcgtcgcaacaatctggttgtgcaattgcggggcattgagtagttttaggtaagtgtcgcctgcgatcgggtgaaaccgtatcacggggttgtatgggcggctgcaatcgaagacgagaggataccatgatcaagatcattaccgattcagtggcatcgataccttccgatatgcttgccggcaagccggtcgaagtcgtgacgctctacgtcaaccgcgatggcgtcgagtacgccgatgccgaaatggacctcgatgcgttctacgccgacatctacgatatgatcgacaacattccgatttcgagccagccttcgcagcataccctcgaagaggttttcgagggtgcggcgcgagcgggtgacgaagtgctcggggtgttcatctcgtcgcacctttcgggaacgttcgacggcgccgtgcgcgccgcacgcgccgttaaagcccgcaacatcgatttttcgtaccgtatcatcgattcgacttcgtgcgggttcgacgagggatgggcggttctcgctgcggcggaggcagccgcagccggcaagagcctcgatcagtgcgccgaggcggctctttcctccatgcaggcaacccgctttctcttcacgcccgaaacgcttacgtttttgcagaagggcggacggatcggcggcgctgcggcactgctcggcaacctgatccagctttcgcccgtgctgaccgtacgcgacggcgaggcgacgacgtttgccaaggtgcgcacccgtaaaaaagcgcttgagaagattgtccagacgtttctcggcgacgtcgaagagcacggtctcaaaaacgtcgtcgtccactatatcggagacaagacccccgcgctcgagtgggcgaaaaacgtcatcgagccgcttgtcggcgcatcggtgcgcgtgcttccggtgagtcccgtcatcgggctgcatgtcgggcccgccgtcggcatagcctacgagtgcaaacaggctttgcagaacaagatcaacggctcgattcaatcattgtgcgttcagtaaagagaaagcgatgtaaagcatgcagcaccaatgcaacctgatcattgattcctgttgcgatttgcctttcgaggttgtgaaccgcgaaggcatcgatctcatcgagttcccctacatcatgagcgacggggagcacgccgacaacctctaccagacgacgagcgcacacgatttcttccagggcatgagagacggggaaaccccctcgactgcccagatatcggtgccgacgctgcaggctgcattccaaaaggcggtcgacagcggcgtcccgacggtgtttttgagcttctcgagcggcctttcgggcagctatgatgtggctgccatggtcatggagcaggtgaaggagcaaaaccccgaagccgaactctacatcgtcgacacgaagctcgcctcggtcgccgagggcctgctcgtgtacgaggctatcaggcagcgcgacaagggcctgacggcgaaggagctcgcccaatgggccgaagaggccctgaactacgtcgatgccgaattcatggtcgacgatctcgaatcgctgcgccgtggaggccgcattcccggctcggtcgcctatgccggctcgaagctcgacgtgaagccgcttctgaccatcgattgcgaggggaagctcacgctttcgggcgtagctcgcggtcgcaagaagggcatcaagcagcttgtcgactactacgagaggcgagttgcctcgaaggcgccggggcagtgcgtggtgatcgcgcattccgattgtcccaaagacgccgagcggctgaaggaccttctgtcgaaggtcgacgacagcatcctgtttttggaaagttacatcggtcccgttatcggcagtcatgtcggtccgggcatgatcgccgtggtattctggggatacgatcaacgcgaggagatgtcggtcgccgataagatcgcgcgcagggtcaagggcggcgagcgcgcttcgtagccgaagggacgtaaggggagagaagatgggcaagacgtttgtgtttgcgggtgacaccgcaataggagccgtgctggctgacaatttggtgaaagccggctatcgggccgcgcccggcatcgccgaagccgatgtcgtattcaccttctgcgctacgcagaccgatctcgaggatgtgtacttcgataccgagggcctcgtgcaggtggcgggcaagggaacgtggcttgtcgatctcagcccttcgacgcccggtttcgcgcgcgaactcaacgccgtcgcaatcgtaagcgaactccatgcgatcgaggcgccgctcgctgtgcgcgatgcgacggtcgaacgcgcttactccgatacggacaacctcatctgcttcgtagcttccgaagatgaagacgaaaccgccgaaatactgccgatgctcaaggcgcttgccggaatggtcgagccgaccggaacgcccggatcggcccagctcgctcgtgcagccctcacgctcaacaccgcttctcagctcgtttccgtgatggaggccgatgcgctgtgccgcgcctcgggaatacagagttcgggggcgtttcgcttcgcacgcgagcaaggtttcatcaccgaagccgccgctcgcctctatgccgctgtggtcgagaagcgcttcgtaggcgaatattcggtgaggatatgcatggccgaactttccgcggcgcttatggccgccgatgacatcgaccttattttgcccggggccgaagcgggtcttcatctgctcgagcttttggcggttatcggcggaaccgatatggcggtgtcttcgctgagcctcgtgtacggcgaagaggcggcctgtgccgcccagggcctcgattggacgcgcgccgagcaggcctacggcgatatggaggacgatggggacgagtgcgattgcggcggcgaccatcatcaccatgaggagtatcccggcggcttcggcgggtactcggcgaactaggtggctgtgggctttttgcacggcgataggcttgaatcaaccggtttcgcgtccgatgcgcccgaaccgtcgccgtgcgtttccgaaccgcccggcacgatgttcgatccatcgcctcttccgcccgagcgctgcatgctttgtccgcgcggatgcggggcgaaccgagctgcgggggagcggggcgcgtgcggcgcgggggcagagcttgcggttgcccgtgcggcgctccatttttgggaagagccgccgatcagcgggaacgcgggaagcggcacggtgttcttcagccattgccctttgcggtgcatctattgccagaaccacgagatcgccgtcggacgagcgggcagggcgataacggccgatcgccttgcggaaatatttctcgagcttcagagcgcgggcgcactcaacgtcaacctggtcacgccgacccattacctgccccaaatcaaacatgccatcgacgccgcgcgcagcgtcgggctttcgctgccgatcgtatacaacacttcggggtacgaaacgcccggggccatccgatcgcttgcgggctacgtcgacgtctacctgactgacttcaagtactggtcggatgatcctgctcgcgcgtactcgcatgcgtccgactaccgcgaagcagcctgctccgcgctcgatgagatggtttcccagataggcgggcttgcttacggcgagatcgccggggaagacggtccggtgctatcgcgcggcgtggttgtgcgccatatgatgctgccgggcctgctcgacgactcgaaggctatcgtggcgcatctcgccgagcggtacggcgactcgatcgcgctcagcctcatgaaccagtacacgcccctgcgcgcgtttcccgaacatcctgcgctgaacgagcgggtgcccgccgaagactacgaggcgctgctcgatttcgccgatggcctcggtatcgaagactacttttggcaggagggcgatgcggtgggcgagagcttcatccccgcattcgacggaagcggggtcgatgggagcgcgcggggcgattgatcgctttcggatgcgtctcggggtgcttcggaccttcatctgcaacgattcgccgattgccgttggcattccgatctgatctttcgcgcaggcggctctggccctgcagtgcgcaacgggttatcgcctggtgatttctctgcccggcagcgtttccttcatctcggtgatgttcttccagaagcgtttgggcatgaactggcggcggagctcggggttgtagcgggattccacggcgatggtgttgtagaagcgcttccaagctgcctgcatcacctcctcttcggtggaatgctcgggcagcatcaggctgtccgttttgacaagataccattccttcccctcgtagacgcccgcgatacgatggttctcgtcgtagatcatgaacgcctgggtgttgaaccttccggcgaaccagtccatgatgagcggcacgaccgaagctgcggggttgcatcgggcgaaccaaacgtctccttccatatgttcgaagcggaggaattgcagcatgcgatgtcgctcgttgtagacggcgcggttgagttcgtggaacggcgcgacgcttggatggacgatatcgttgagtgcgctgttcttctgactgcgggtgcacaggcctccgcagcgcattttgcgcgggcatcccgtgcaatcatgcggtttgtgcttcgccatggcgtatcgaacgaaccggtacacgatgcttcccgcagcaggatcatcggaaagcgacgcgcttttaacggcgtcgaatacaactggtccgcacgtgcggcagatgcccttctgcacgcgcagcgcaacgtccatatccgattcgatgtcgcgcatctcttggccgaggcgcggttgcaggttttttgcgatgacgacatcggacggatcctctttgcacgcgtaggcggtgaagatcgcgcttagaagaccttcgagcgagccgtcgtagacgtaagcgagttcggtcatgcgcatgtgccgatgagaactttttcgcggctgggccgagcgggcccgcggagctgggcgcttgcggatgcgccgaaccattcgggcagcgatgcggcgagcgggtcgtttgtcaccgcgggaggttcgtggagcgtgcggtattcttgcggtcgcatgatcttgggcttcggtacttcggtttgctcgaacaggctcagctgcccggggatggccttgtcggcacgccttccgtggcttccgcctttaatgggggccgcgagctgcgcccgcaggccttcgcgtgagaaatcagcccctgtgccgccgtagctgccgttgcaggttatgaagtaacgtgcccgtttgtaggcgatacccagctttcgcagttcgggttcgcgcagggtcgagcgtttccgtgccctcatgatggatttcgcgccgcgcacgcctatgcccggcacgcgcagcagcatttcgtaggacgcggtgttcacttcgacggggaagcgatcgaggttgttgatagcccagttcgctttcggatcgagcatcggatcgaggaacggatgctcttcgtcgatgatttcgttcacgtcgaaccggtagaagcgcaaaagccaatctgcctggtagagacggtgttcgcgattgagctcgatggcatcggccgaaggaagccgcctgtcgtcgtttacgggaagataggcgctgaagaatacgcgcttgagagacagcgtgcggtacagcgatgccgaaaggttgaggatatggtaatcgctctcgggggtggcgccgattatcatctgcgtgctttgcccggcgggaacgaatgcgcgcgttttcttcttcggcttgctttcagccatataggtggtgcatttgcgcatgattgcgcgcgtatccttgtcttcggcgatgttctccttgatttgcttcatgggagcgaggatgttttgcttgttcttttcaggggcgagcagttgcaggctcttctgcgacggcagttccatgttcacgctcatccggtcggccaggtgcccgagctggtcgacgagttcgggcgaggtgccgggaaccgccttcgcgtggatgtaaccgcgaaacgcgtgctcgaaacgcagtatctcgagtgtttcgatcatgagttcggttgtgtaatcggggctcttgatgacgcccgaactgaggaagagaccctcgacgtaattgcggcgatagaagcctatcgtaagatctgcgagctcgcgtggcttgaaggcggcgcgagctatctcgttggagcatcggttgacgcagtaggcgcaatcgtatacgcagacgttggtcatgagcactttgagcaatgtgatgcagcgcccgtcggctgagaagctgtggcagatgcctgctgccagggtgttgccgagcttccccttctgcgcatcgcgatcaatgcccgaagaggtgcaggcaacgtcgtacttcgctgcatcggcaagtatttccagtttatctgcgatgtccatgcggctccctgaaacgaatatttgttcgtataatagtatgcaaacgaatgttcgttgtcaagaagtcagtctctcgtgtggaaatagatgctggcgaagccccgaccgtttttgagcccttcttaagaggttcgcccttacgggaccttggctatgtcggcatggaaacgctgagcttcattcccaacgcttttgagactttcagtatggtgtcgaaagaaggattgccctgcggagaaagtgccttgtagagcccgtctcgggtaataccggtttctcgcgcaagttgcgtcatgccctttgcgcgggcgatattgcccagggctacgtttatgagctcgctgttgccttcttcgagcgctgcattaagatacgcaaccatatcctcttcggtttctaagaattcaaccgtatcccattttgccgctttcttcatttccaccgcctctttcgtcattcgtattcgccattcagccgtttcgctcttgcgatgtctttctgttgagtcgatttgtctccgtcgacgagcagcagaatcaacttatcttcgcgccaggcgaaatacagccggtagccaggcccgtaatcgatcctcatttccgatacgccgtctcccaccgacttgcagtcgccgaggtttccggtcatcgctacgcggtcgaccctcaggttgatgcgcgccctggctgaagcatctttcagccgcttcagccatcgggcaaattcgtctgttcgggcaatctcgatcatgagtatattatagtatacaaatatacaactacacaaatatacgactatgtaattccgctgcttgaccaactgatgcggctgaaggcgcaaagtcgtcgcgcccaagccgccttgcgtctctcgatagcaactcggaaaatcaggcgatgtttcgataggtctcactaagctcacctgcaaggcggttgccttttcgtgcaactcgtggtgtctgagaagcaggataggcgtatgcgcttgccgagcgcgaccggctctacgtcgaggcagtcgacaggcgcgtgttcgcctatatctatgcaggtcccagcgagggcctcgatatgagcgtcggcatgctggtcgctgcgttggtcgccgcactgctgcaagggttctggttcagcggatttgttctcaagcggatgcgctacgccacgcggctggccggtttcgcattgacggcggcaccccttattttcgcgtgcggttggtttgcgggctggtttcccccacgcatcgaatccgcggcgagcttcttcatcgtcttccttgcgatattcgccttcgtatccgtcggctatacgctgtatttcaagaaggtggcgggcggataccaggaagcgctcgaggcgtatcgcaagcaggcggcggaaaagaggggatgagccgtcgcgcccacgcgtttgatcgggtatcatggttcagctgatggctgatggctgatggctgatggctgatggctgatggctgatggctgggcagggtatccgcgaggcgcttctcgcaactgcttcgccgccgacccgcgtgagggagtcgatgaggcgtgcttacatcatatatttcgctgcgctcgtgctgttcggcacgaacggcatcgtcgcgagttctatcgatctgccgagctatgagatcgtgctcgcccgcacgttgatcggcagtctgttccttgcgggggcgtttgcgcttagccgcaagaagctgcaattcttccgcgtgggaaggcaggcgtggtacctggtggtttcgggggcggccatgggggctagctggatgctgctcttcgaagcgtatcgccttgtgggcgtcagcgtttcgacgcttctgtactactgcggacccgttatcgtcatggcgcttgccccgcttgcgttcggggagcggatcgggcgggcgatggccgtcggtttcgttgccgtgctgctgggcatggtgtgcgtcaacggcttttccgttcccacgggcgattcggcgtggggttttgcctgcggcgtcctttctgcggtgctgtacgcggtcatggtgatcgccaacaagaaggcaacgggcgtcaccggtgtcgaaaactccttgtggcagctggtgttcgcctgcgtggtcgtcgccgtgttcaccgcgttcaaccatacgggcgaactatcgattcccgcccaaagcattctgccgatgctttttctcggcatcgtcaatacggggcttggctgctattggtacttttcctcgatcaagcgcctttcggcccaaaccgtttcgatcttcggttacctcgagcccctgtcggccctggcgttctcggcgcttctccttggcgagcacctttccgtcgtccaggtgttcggcgccgtgctcattttgggcggtgcggcgttcggcgagctgttcggcgggaaaaagacatcatccgacacgccgtccgagggcgaggctatcggttagcaaggctccgcttcgcatgtaccccgcgcatcttccgcaatcgaaaaacattgcttgatctgcttatttgaaaatacccccctatggggtgtactgcattttccctttcgcggataggctttctccgtcaaagttcaacgcgcggcatcgccgtgaaaggagtgaaaagcaatgggaggaagcacagcaacgaatatgagccgtcgcacgtttctcggagcggctacggttgcgggggttcagcttgccgttttcggactggcggggtgcgcaccgagcgcccagggggaatcgggcaaagccggcggcttcactgcgggaacctacaccggcgaggcggagggcaagttcgatgccgtcgtcgtcgaaaccgattttacggaagactccatcgctgccgtgcgcgtggtgaaaagcggcgacaccgcccgcatcgagcaacccgccatcgagaagatgcccgagcgcatcgtcgatgctcaggggctcggtgtcgatacggtgacgggttcgacgcttacgagcatggccatcctcaacgcggtgtcttcctgcgtcgagcaggcgggcggcagcgtctcggcgctcaagaagaaaggcgcgtccgagccgagtggcgagcatgttgatctcgaggccgatgtcgtcgtggtcggcgcgggggcgagcggcatgggcggcgccattgctgcggcgcagggtggcaagcgcgtcatcgtactcgagaagaattcgaacatcggcggcaactgcctggtttcgggaggatacctcgaatatcttgccgcgcccgatgatgcgcgtcccgcgatgacgccggagcttgagcgctatgttgaagacgtgctcggcagcgagattgcggcccagtcgaatcccgaggtggtcgatgcggtcaggcgggagttcgaggcattcaaggcatcgggcagcgcgaagctgttcgattcgccgaattactacgccctcgatttcgcggttacgaccggcgagggtctgcccgtcgaggcgtatcttcccgtggggaagaacatccttgcgctcaaccagtggatgactgaaaacggattcgaatggatcgagcccacgttcgcgatcacggggtatcaatacccgcgctggtcgggtcctgtggaaggtgtcaacggcgaaggttacttcgatttctacgaagatttcattgcgggcggcaccatggacatcgaagtctatcttgccaccgcggtcgacgaactgatcgtcgagaacggtgcggtcgttggcgttgaggcgacggcggaagacggcaccggctacaccatcaaggccgagagcgtgttgctcgcatcgggcggcttttcgggcaactcggatatgctcaggcagtacaacaccgagtgggagtatccggaaggcgccattcccaccacaaacgtcaacgggcataccggcgacggcatagccatggcaaccaagctcggtgcgggcgttgtcgatatgggcaatcagatgatgtttcccttcaacgatccggtcaacttctcgttcgaggatatcatgggcgcgttcggtgacagtccggtcgtcaacaaagacggcaagcgcttcgtcgacgagacgaccgatcgcttcacgataacctccgagcttatgaagcagcccgacagcctcggattcttcgtgtgcgacaagaagtgcagcgactacccgtccgaagagcgtcaggaaacgctgctgcgccgcgggcttttgtatcgggccgacacccttgaggagctggctgagcagatggggtgcgataagggcgcgttcgtcgaaaccatcgaggcgttcaacgaggccgcttgggcgggcgaggacgagacgttcgggcggtacctgttcaccgaactgagctcggtagaggagccgccgttcttcgcctcgccggtcacgtgggccgcccacatcacgatcggcggcctggccaccgacgagaacacgcatgaggtgctcaccgaagcaggagagcccatcccgggcctctatgcggcgggcgaaacgcgtcaggacatctgcggcgtcggcagcatggccgacgggttcgcagcaggccagacgatagcttcgcgctaggcgaccgggaggctgcagatccgcagcctcccgctttccgtccctgctcgccaaagtctaaattgacaagaaaacttggcatgctgtatacttcattatgtcaagaaaacttggcaatatgaagccgttgcacattgttgggcgagcgtgcgcgggtgcaggcgggagacggtcgtgaacaaaagcgaaatcctcgaaaagagccgaagcgaatacggcgtcgtcgacgagcgcgagaagcagatggggtatcgtgcggcatcggtcggcatgtgggtcacgttcgcgctcgttatgatatacggtcagataaagatctttgtattcggagaatcggcgaacgatatcatggcgattgcgtttctcggcgcggctgcgacgtttttcgcccggtatcgttacgcgcgggagcgtgcggccttggcgggcgggatcgtgttctcgttcgtcgccctcatctggttcgcaactttcatcctgcgcttctacggggttgtcgtctgatggatgaccggttgatcctgcgcaacaatttgcggaaagcccgcaaggagcggggctattcgcagcttgagttcgcccgcctcgtcggcgtatcgcgccaaaccgtttcgtcgatcgaaacggggcagttcaatcccactgcaaagctcgcgcttgtcatctgcatcgcactcgacaagaagttcgaggagctgttctacttcgactagggggaagcggtttcgggggcgattcgctcgctgaagaaacgccgctcgacgccccgatcgcctatcgcgctcggggcttgccctgcctgttcccccgtcgccttagcgctcggtacgggttgcgttgtcgggatcgatggacatgctctggaagcggtgctccatgtactcgttgtcgaagtggtcggcgaagaactgctcgaccggcgtgtcgggcgttctgcccgcctcccgttcgtaccagcagtcgagcgacatgagggtcatcacgccgtttgtgatcatgagcgcggcggctacagtggtgacgatgtagcgccagttccacggaatgagattcacgattttgagcatttgcggcagcaaaagcttgatccataccacgccgaggcatccccacatgatcatgaacatgccgttcgtgcgcccgtcgatggagagccatgtgcccgagtaatcccaggcgatgatgccgaatgcaaactgcatgaaccagcttgtcaggtactcgaacgcgccgccgatgacagcgcttacgaggaagatgatgataatgggcttgtcgtggaagcgattcagggcgacggtcatgaggacggcgccgaagccgtaaatgggggagaacgggccgaacaggagccccgctcggtcttcgtagcctccgaacagcatgaaatggtagatcgtttcgagtatgagcccgatcacgcagcagacgacgaatatccagaagatgttgaagaagttcagcgtgatgaatccttctcccgaaaggtcgcggcccgctcggtcgccgagctcggcctgcgagcggtcctccatgaggcgcagcttgcgttgcagctcgcgctcttcggcaagcgagggatcgatgtagcttgagagagcaatgaggatcacgaaaatcacggcgtagaagatatcgtcttcgtttaagccgaacagcatcatgtcgcataaaacgatgaggatcacgagcaccatgagcacttcggcgacctgtctggccccacggcgtttgttgcgcatgaggcgcgcaccgaggatgatgaacaggatggtgagggcggccatgagcccgatttgggcgaagaacaggatgttcgacacgatggaatcgtcggagaacatgccctcctgaaacgcttcgaccatcacgaaaacgagaaggcctatcaacggcaaaacggcaatgccgccgatgaggcacagtatgccgaatatcttcagcggcagcgggatcttcctgttgtcgagcggggcatcgggatcgcagggggtttcggcttggttgggaacatctgaatcgccgggttttgcttcttcgggaacccgggcgtcgtgatcctgcatggttgctcctgttcgttgccatcgaattatgggatcgcatggccgatgtgcttgcgagagccgggtcggcgccgccgatcgccggccattgttggaacacgttaccataagacatgtcatttatccagtacagccattgggtcgtatcggctgacgccgaagccgtcgccgggcgcgtcgcatcgcggaatggcgcttattccgtttcggcatcgtttggatagcgcagcgcctcatccagcggcgggaatcggaaatccaactatgccgacaccttgcccccagggggtcgaatcggactttttcatatgccctcccatccttttacaatcactcgtcgacgaggttaatcggcggtcggcgccatgtgctgcgggtcacgtgcgatcgttggcggcgtccgcttggggcgagagaggagtttgcatgagaaaaggaatgaatcctgatctctatcgcgatgagtggcaatggcaggaaggggatacgacggtcacgcgaagctgccagtggtcggggcctggctgccatcaaggatgcaatgttttgttctacaccaaagacgacaagctcgtgaagatagagggagatccccgctctccagtgaacgagggccggctgtgcatgcgctgcctggcgatggtcgaggcggtgaatcaccctgaccgcattctgcatccgctcaagcgcgtgggagagcgcggcgagaacaagtgggaagagatcacgatggacgaggcgtatgccatcatcgctgaaaaagcccgcgaggttaccgaggagtacggtcccaaatccattgtgacgggcatcggcacggggcgcaatgccacatggcagacgtcttcgctcgcattcgccggattcaagacccccaacgatacggccggcatgctttcgggcgactgctgctatacgccgcgtctgcaggccatgaacgctattttcggttccgatttcattgcggattgcgctcagctttcagccgaccgattcgacgatcccgaatatcgccgtcccgatgtgattttgaactgggcctgcaatccggtcgtgtccaacgccgacgggttcttcgggcactggatcatcgactgcatgcagcacggttcgaagctgttcgtggtcgatacccgtgtgacctggatggcggcgcacgccgaaatgttcttgcagcttcgtcccggtaccgatgccgccgtcgcgctcggcatctgccatgtcatgctcgaggaaaacctgtacgacaaggaattctgcgacatgtgggtgtacgggatggaggctttggaggaacgtgccgccgcttatacgcccgaggtcgtcgagaagatatcctgggttcccgcagagaaaatcgtcgaagcggcccgctatctggggtctgctggaacggtcgccctgcagtggggattgccgctcgaccagacgaagtgggctgtcggtgcttcgctggccgttgcggccgtcgaggttctcacgggttccattgacgttccgggtggtttcgtgaacgtgaagtacggccatgttcaatccgatatccgcgagaacatctgcaagggcatgggcaaggaagtgcgcgagggccgcttgggcgatgggaagtacgcgctgcgcacggttgggttcggtcctcactccatgggcgacgacatcctgctcgcaatggagaccggcgagccctatcccatcaagatgggctttctgtgctccacgaacagcttcatcaacatggcgggcgaatcgaagcgcgtgtacgaagcgtggcagaaggttccgttcgtcgtggtgtgcgaccttttcatgacgccgaccgctgctggctgcgccgatatcgttctgcccatcgccatgggctgcgaacggtggggcatccgcgcttggtttacgccgctgcgcgccatcaacaagatcctgcaagcgggcgatgcgcgcggagacgagcagatcatgctcgagctcggtcagatcctcaatcccgatatgttcttctgggatacggttcccgagatgaacgaatacgttatgaagaatctctcttcgatgccgttcgacattacgtgggaggaactgcaagagaagacgctcgtgtatccgaaattccaataccgtaaatacgagacgggcgatatgcgcttcgatcatcagccgggcttcaatacgactacgggacgcatcgagctgtactgcaccatgtacgattcggcgggtatcgatccgctgccgagcttcaaggaacccacgtgcagccccgtttcggctcccgaagaggcgaaagaatatcccttcgtgcttacgacgggacgtaggagctgggaattcttccattcggagcaccgtcagctcaaatcgatgcgcgagttccacccgtggcccctgtgcgagatcaacacccaggacgccgaggagctgggcatccgcgacggtgattgggtgtacctggagaaccagtggggcaagatcatgcagaaagccgaggtgtccgacggtgttttgaagggcacgatcatggccgagcacgggtggtggttccccgagcgctcggggaagctcgaagacggtctgtacggtgcgttcgattcgaacatcaactgcttgaccatccaaaacgatatggcgactgcgggctacggatcttcgtacaagacccaactatgcaaggtctacaaagtcgaagacggaaccgagcctaagggcgatatgcccgaaaacgtaggccgcaatcaattcgaagtcgtgaaccggtagggaggaggaatcatgttgaacggcttgcttatcaattacaacttctgcaccggatgccacagctgcgagatggcatgcaaggtggagcatggttttcaagaggggaaatggggcatcaagctcacgcagcagggtcccgatcttgtcaaggaaaacacgtgggagttcaacttcattcccacgccgaccgatcgctgcgatttgtgtgccgatcgcgtgaaggagggccgtctgcccacgtgcgtgcaccactgtcagggcctttgcatggaatacggcccggtggaggaactggctaagcggatgacctcgtcgcacatggtgcttttcaccccgtgcgaggaataggagtgagatcgtatgaacagagaagacgttgccgagaagtacatggatctcgtgagcgattggctttgcgtggaagcgtacataaaagacggtgcgctgtactaccgctatgatgccgccgacccggtgacggaacccgggcagatcaccttcaacaagatcgccgatggggcaaccgagcccgtgcaggtgacaaccgtcgagttccatgaagcgcaaaagggagacaagctgaaataggcatgcaacgcgtcccgccgcctggttggcgggcgatgggacgcaacccgattggagacagaatgatcgcgcgcctgccagccgacttcggcaggcgggaggaagggggctgtgatggatcgccagaagatcatggacgcatatgccgacctgttggctgccgagtcgacggtggaggcgtatctgctcgacggagagctgtactaccgctacgaatggctcaacgaagtcgagatgatgcccgagatcgtgtactaccgaatcactggagacgaaagtcccgatgagaaaggggaaatcgttcccttgggcaggtattacaaagcccagaaaaacggggagaaagtcaagtaatcgcagcgtcgtcgcaccgatggcgcaggcgagcaagcgtaaaggagcttttcatgtgttttagaccggcagatgcgcaagcagcaacgaaacaatgcccgaaatgcggggccgagaacagctttttcgatacggaatgcaaggaatgcggcaccgagctcgcctccagcagcccgcgtcccatgggtgctcccggccgaccgcccgcgccgagcgctcccggggctccgaaggcgccgggagcgcctgctgcccctggggcgccgaaggctcccggagcccgatagcgcataggggaatcggctgagcgtgtaggaaagcgcggttgtgcggagcgttgaacgaggatcgatgggggagatatcatcatggttcaagctgggttcttgaaacttgctgccgaggaaaaagacggcgggcagcgcatcgaggttgaaatcgaggtcggggccgatcgggtcgatgaattgcttgacgagttctatcgtttgatggcgcgcgtcaggggcatcgatgccgcatcgggagactgctcgtcgttgagccttgctttggcagatgcccttggcgaggaggaagtccgggcggcaagtaaggatttcctgcttaatcgacttacgatggaggccgtgcgcgaactcggcatcgataccgtgcttgcaccgggcgtccatgcgaaggaggttccggcattcggccgtgccttctcgttcgttgccaacctcacgccccgccccgagctttcgcttctcgatgcggggcccgtgagggtgcagcgtcccgtcgtcgcggtcgaagagagcgacgtggatgcgcaggtagctttttccgcccagcagtgcgctgaattccagagcgccgatcatgcggatgttcgcgtgggggatttcgcgctcatggacgtagacatgctgaaaaacggcgctccatgcaaaagcctctcggggttgcggcggcgcgtcgaggtttccgaggggtgcgttccgcaggggttcatcgacggcgtgtgcggtatgacccccggggaggaacgctccttctcgttcgatgcagatgacggggccgtcggcgaaaaaccggatagctatcgggcctcggtcaggttgtacgaggtgcagaagcgggttgtacccgtcgtcgacgacgagtgggtcgagcgcgtgctgccccagttcggaaacctcgaagggtttcgtgctcgcatacgtgccgatttggagcagcaaaaggagaaggtcgaacagcaggagcttgtgtttcgggttcgatcggctctggaaaaaaggctcgtcggcaccattcccgacgagatgtaccaggaagcgaaagaatcgctgatggcatccaccctgagctcgatcgacgccaagggaatgacgctcgaagagtactgcgacgagcacggcaccacgaaagatgcattcaacatgaacgtgttcatgcaggcggccgagacgcttcgccagaatttggcgctcgatgcgcttgcgcggaagagggggattgcggaaacgtgcgacgagatcgccgaagcaaaggccgctcttccccaaactctagccacattgccagacgaggagttcgagcggcgcggttaccgagcgtcgctcggcgagagcattcgccgcaagaaagccttgtcctggctgatggaaacaatgatcgttgagggctgatccgatgccgggcccgttcgggagccgttttcgaacgtcctttgcgactcggcatcaaaacgggaggtgatttgcgccacgggggctgtgcgcatcaaggatgcagttgacatcaaaggcatcgcacctttgcgtgcgaggaggaaaaggggttaaaacatgaccgatacgacgatttccgctcccgaacctcagggaggtgctgtagggaagatcacgaacgccatatctcagaaaatggggcttatgtacggccttggcatgatgttcttctccgggtggaatcaaatgctgagttcgtattggaactacttccttacgaacgcggtgggcatggatcctgcattgatgggcaccatgaccaccatatcgagcttcatggcgtggatcatcgtgttcatcgccgccgttatcatcgagcgcgtgtggctgcgttggggccaataccgctcctacatgctgtttgcgcccgtttgcgctctggtcttcatcatgggcgcctggaccgattggacttggatcggtgtcgagaccggcagtgtggcccaagccgtactgatcggcggctgctacattatcggccagttcttcatcaacctgttcatgatttctgcaacgtcgatgatcacggtcgcatcgaggaccgaagccgaccgagcgctgatgtctgcccgcaaggctcagggcaacctgatcatcaagctcttgttcgctgcggtctcgctgcccatgatcatcttctttgccggcggcgatgttgcttccaacacgcgccccgatacggtaatcggctataccatcacggcgtttatctggggcatcgttttcgtgctcgcatacgtctatctgttcaagatgttcaagggcatggatccgaccgaggagtactgccgcaagcgcgccgaggccaagaaggcaggtcggaaggccgaggagattccgagcgatatcgagaaggtgtccatctggaagtgcctcaagtacttctttacgaatctgcctgcgctgggcctgttcatcggcgaggtcggacgtgccatatggtcgatgctgctcggagccatggccgtgtactactgcaccgtggtgttcgatcaacccatgctctacgccggctgccttacgctggctaacgctgcgggcttggtcggcacgttctgcggcgaggcgattgcccgcaagctcggcaaccgcatcacctacctgacgggcatcgccatcgtaatcgtctcgatgattttcggctacttcggtgcggcgtcttcgacgctggtcttcacggttgcgatcgtcgtcagcttcttcggcggcaacatgatgatggccgtcgagttctcttgcatggcgaacgccattacctatcaggaatacaagaagggcgaaagcgccaaggcattcatcatgggcacgatccagtggtgcccgaacatcggcaagatgttccagggcgccatcatcggtttcggtttggcatcgatcggttacagcgcatcggtcgaggtggtgtccgaagccatggtgcagggtattacgtttatgaccttcatggtgccggcgatcgccatgatcgtctgcttcgtcgtcttcttcttcctgcaccgcctgacttccgctcagatgaaggaggcggaagaggcgctggctgagcgcagggcgaagtagccggacgcttgggatccgaatccggcctgcttccatccgccggattcggatcgggcggccgagtggcttccgttcggccgaaggacgttcagtttcagcggcaaccgatgaatgagagcaggtcgaaatgctggataccatacttcttgcaatcgccgtgatcgttacctttgcgggttgtgcgattttgttcgtagacgttgtggccacaaagaaaaccgatttttgccaggaggagactcccgcgcgatatgttggcaagggatcggacgatcagacggagtcgaacagacgctcgggccttttcgttctcgccgtgcccgaatttcgctacgagttcgaaggcagaacctaccaaggcaagagtgcgaacgtatttttccatctttacctggggcgcaaacagcttcccgttccgtttctcgatggcaaaacctatctcatctacgtcaatcccgcacagccggccatgtacgtgacatcgggagagcagcggtttgcgttcatgcacctgctcggatgctcggtatcggtcgtcggcatcatgctgctgctgttcgccatgggcatattcggatgatccgagggtttctgccggccgtctcgggcgcatgctcggtcggatggcgcgcggcgggcggagccgcacggaaaacgatggggtaagggggtcgcatgcgcgggcattggagcacgcagcgctttcgcagaaggcgcgcaaagttcaggccgccgcccgaatgataggcgagggggcatcttcctgcataggttgatgcaaaacgacgagaaaccagaaagaagaggtatcagagttggctacttacatagatgaaaacgccgctcctcaggtgcgcgtgctggaagatggcaccgaagtacaccgtacgtctacgtggtcgcctccgggttgccacggcatgggatgcggtgtgctcgcatacgtcaaagatggcaagtgcgtaaaaatcgagggcgatcccgatcaccccacgacgaagggtcgcctgtgcgtgcgctgcttgcgcgtgctcgacctcatctaccaccccgatcgcgtcgttcacccgatgtaccgcgacccgaaggatcgaggcaacgccgatgcgtggaaggttgtttcctgggattgggcttacgacaagatcgaggaagagatcaagaagtgcaaggagcagtacggacccaacagcttgaccgtgctgacgggaaccggccgtgaagcgggtcgctacatgacgaacacgtctgcccgcatttgcgttaccacgaatcagtgctatacgcagacgggcttctcctgcatggctccgcgcgatacggtgtgctcgatgatcggcggtgcgggctacattgaatacgacttcgccaacggccttcccgggcgctatgacgatcccgagtacgtgcagccgaagtacctgctcaactggggacgcgactctctccgttcgaatcccgacggcacgtggggtcattcgatcatcgagcttctgaagcggggcaccaagctcatcaacgttgatccgcgcgtgaactggctttccacccgcgccctctactacatgcagcttcgcccgaacacggacacggctcttgctttcggcctgttgcgcgtgatcatcgaggaggatctgtacgaccatgacttcgttgagaaatggtgctacggcttcgacgaattcaaagagcgcgttatggaatacacggtcgattgggctgccgaggtgaccgaggtgcccgccgaaaccattcgcgcggtcgcccgctgcctgtccgaaaagccctggggtctcaacatgggcctcgccaacgatcagaatcccaacggcgttcagagcgtgcattgcctgtacgcgcttgtggcgatcacgggcaatctggatatccccggcggcacgaacatcggttggaacatcacgctcgacttcggcggcaaccagttcgacaacgtcgacggggtggggggcagcaagaaaaaggagaccgttcccccgaacccggttacccaagaacagcgcgacagcaccgttggcctcgacgtctatcctatctacaagctgctgctcggcaaggcggtgcccgacgagtttctgccgacgcttgaaaccgatgagccgtacccggtgcgcttctgctggatcctgcacaccaatcctgtggctcccaccaatacggcggctccgggtcgttggcataaggcgttgaagcgtatggacttcgtggtcgcacaggacatcttcatgaatcccaccatcgcttcctgctgcgatctgttcttgccccttgccacatggctcgagcacgatggctacatcacacagctcatgggcgagcatcctggccccgtggctgcaatggtgaaagccgtcgagccggtcggcgaatgcaagagcgaattcgagatcgtccacgatctggcccagcgccccgcatttcgcgacaacttctacgtcgacggcgaaagcaaggtcgaaagcatcgagcgctacatctccgaggacctcaccaaggtggtcgggttcgggcacgattgggaatatctcaaagagcatgtgcaggtatgccgcaagaccgagtaccgcaagtacgaacgcggcatgctgcgtcctgacggccaacccgggttcaacaccacgacgggcaaggtcgagcttttcagcctgatgttcgcggcgtgcggcggcgatccgctgccctattacgaggagcctgtgttcagcgagtactggcaagacgacgccgacgagctacactcctgcgccgcctcccgtttcatgtcggagtacaccgccgaacaccccaactggaaagacgagtatcccatcaccatcaccacgggtgctcgcaactgggcttcgttccattccgagcatcgccaatcaaagatgctgcgcgagatcaaaccgtatccggttgttgccatgcatcccgatctggccgaagagatcggggtgaccgaaggcgaatgggtgtgcatcgaaaacccgtggggcaagtgctatgaaaaggccaagatcactccgatcctgaagccgaacgtggtcatggccgaccatggctggtggtatcccgaagaggatatgaacgaacccaatatcggcggcgtgtggaagtccaacatcaacgagctcattccgaacaacgtcgtcggccactacggattcggcgcgccgatgaagtgcatgatcggcaggttgtccaaagccgatcacgcgccgcttgtcgagcatgctccccaagatcttccgagcctgcagaacttccccggctccatcaagaacgatcccgctctgcagaatcttatggccgaataggaggtaggaacatggctcagaaatacggcttgctcatcgataactactggtgcaccggatgtcattcttgcgaggtgtcatgcaagaacgaacacgaccttccgatcggccagttcggtattaaaatgctcgtgctcggtccctgggagctgatggaggagggtacgtgggagcacacctactacccgctgatcacctcgtattgcgatctgtgcgccgatcgcgtcgccgcaggcggcgttccggcatgccagctccattgcctggcaagcgcgatcgaatacggtccgatcgacgaactggcggccaagatggccgaacgcgatcgaaggacgacgcttctcatcccgtaggaaacggtcggctcggggctgcgcgctgcttgcgcggcccctgcgccgacgggtttttcgcatattcgaaaagaaagaaggaaggccatgtgctttagaccggcagccgcctcgaccccgaaaacgtgtcccgagtgcggcatgatcaatccctccgtcgcggagaagtgtgtgaagtgcggcgccgagctgcccgaagatcggatcaagtgcccgcattgcggcgagatgaacatcgccggcgccatggagtgctctgaatgcggaagcgaactggctgttgcggcgcccgctgctcccgcacccgccgccccggcgccttcgatgcccggcgccccgaaagcgccgggcgctcccgaagctcccaaggtgccttcgaagtagcgcatcgcaggctgcggatatcgcgaaaggttgattcgccatgcaacgcaacaagctctggaacatccgattcgttcatctgctgcttatcgaagcggtattccagtttgcaacgtatctgacgaatccgatcgtttccagctacgtgatcttccttggagcatcgcttgccgtaggcgggttcatagcgggactcgtcgcctctgccgcattggccatgcgacctttcacggggtggatctccgaccgattcagcaagaccacgctgctcgtgctggctgcgctgttgtttacggttgctgcgttcggttgcgcgtttgcaccgaacgtgtggtggatcggtgcgtttcgcatcgtgcagggcgtcgccttcgcgtttcgctcggcggtggtcgtctcgctggtttccgtagtcgtctcgcacgactgcatcggcagggcggtcggctgggtgggcgtggttacgacgacgtcgtgcgccatcgccccttcggttgctgccggcgtcggcgaagcggtcgggtatttcgattgcttcatgatggctggcctgctctttgcgatcgggctggttcttgctgtttcgttcaagctgcccaagagcggttgcgcagatcttggcatcgagcgccgtcggaaaggatgcggcggcaagcgggtgattcgtctgcgcgatttcgtgttcgttcctgctgctccctattcggtcatggccgctcttgcgggagtgcctcacggcatcaacgtgtcgcttctttttgccgtcggggatgctcgcggcatcgcgggcatatccttgtacttcactctgtatgtcgtatcggcgctcgttgcgcggccgcttgcggggcgcttgagcgatacgaaggggttcggcgtcgtgatcgcgccggctctgctcatcgatctggcgggcgtcgcggttctcgtcgccatgcattcccttgccgctgctgcgattgcgggggcgcttgtcggcatcggccaaggatcggcgcattcggcattgcaggccgaggcggtgcgcggtgccgatgtgcgagaattgggaagagcttctaatacattctatatcgggcccgacgtcaatatgggcatgagcccgcttgtggggggattcgttatgcagacgtggggggttgctgcgatgtacgaggtttgcttcggttttgtctccgcagcgttgatcctgttcttggtcatgaaaaaacgatccgctttcgccgccgtttcaggtgcgtcgcgaagcgcaagggatacgcgtccgtaaagcggagcgccgagagatgccgccttgctttgcggcatgcattgagattgtaaatcgattacgtaatcaggattgcttagtcagcgaggtggctgtaatgaaagagctgctcagaagcattgcgggctatttcaaggttcagcatttgctttttcttattcctatcggggccttcgccatttacgacagcgttttttcggcgttctcctctgttctggccatgttgtgggagatgtatccggatgttccccgcgcggggatccagatgatcctcgccgtgccttcgctcgccagcatccccaccaccttgttggcggggattctgacatcgtttgtgcacaagaagaccatcgcggagatcgccctggcgtttctgctggtcggcggacttgctccggcggcgatcgcggagcctcacatcggcttgctgtttgcgagcagcgcccttatcggcatcgggcaggggttgctgcatccccttgcgagcatgctggtatgccagtattgggaaagcaagagcgagcgcagtcgtgtgctcggtttcaagcaggcgatcaactacctcggcgccgccgccgtttcccttctggtcggttttctagccctcatccaatggaacttcgcgtacctgatatacataggcgttatccccgttctgattatcacggctacgcatctgccgaaaggccagttagaggagcgcctgatcaagcgtcggcatccgtcctcgggggtaagaaagctgtttactcccgccttggcctacgcatgcttcatcttttgcgcggtgtcgcttttcaacttcgccttccagtcgaacatcgcgatgctcatcaacgagaagggcttcggcaacgtggtggacatcgcggtgatcacagcgatactccaaatcgcctcgtttgcggtcggcgttttttacgggcagatagtcaagttgtttcgccgatacgtgcttctgcccgggttggtcttgcttacggtaggttttctgatggttgcgcttgcgcccgatatgctggcggttctcgtcggggggacgattttcggcataggggcggggatccagtatgtcaccacgctgtacagcacgtcgaaatcggtagatcagaacgtcgtgtccatggcgctttcgcttgtgctggcgttgacgtcgctcggcttctccgtctctcctctcgtcatcgagggcgtgaaggatttgctgttcggcgcgggaggcggggccgatctgtcgatgatcgtcgccggtgcgggatgcgctgtgctgttcgttatcgaatgcgttcactgtcggttctttgcgggcgacgaccgcctcgatgagaccgtgcccgacgagctgatggattgagttcgcctctgccgcgcggcctgctgcgagcgcagtgcccttctgcgtggctcatcggccccgcctgcagacgtgcgtttcgagttacctgtacgccacccgaaaggagcgattgtgcctgattgctacatgtgtttgccgacatgcgagaactgcaagcccaagatggtcgtgtgcgcggaatgcggtgcgcgtacgctcatggatctcaaggcctgcccgctgtgcaaagcccctattaccgaagaagcgcgcgagcgggcgtgggaagagtggcgttctcggcatgaataagagcggctgcgctgcgggcgggtctgcgcgcgtccgatgcggtatcgaatacgggaaggagccgatcacatgtgctatccatgcgtgaattgcggaaaatgcggagcgaagctcccgcctgctcagattcgctgtccgaagtgcaagacggtgcttaccgccaagcatcccgtgtgcgagaagtgcggttggcgcctgccgttgccgccgggcagcgcgccaggtgcaaccggcgccgaggggcgatccgcccggatgtgattttcgctccgacggcttcggcggtcggcctctacccgatatccttcaagtaggcaacctttgcatgatgctcgatatccgttgagaccacgcgttcgacggtttcgaggaattggtcgatggagctcttctggtagtcgtcgcggaggaccagatacgacgtgatgcgggcgcgatcgtcgtcgatggggcgactcatcatgtcgcgctgcatgctcaatagaggcgatgcggctacggcgggcgaaatgaggaatatcgctttttggtcatgggtgttcatgaaaaactcgttgagcgtttcgcttgagtacgtttgcaggttcggtctcattcccagggccctgttgaagaggtcgaggatggcgaatctcatggggtcgaagcagcgcgtggaggtcatgttgatgggcgtgtgcacaagatcgtctagcatgagcgtttccttggcggcgagggggttgctttcgtgcatccagacgctgagctgctcttgtatcacagggaagaagatcaggcccttcttctcgcttaccctgccgatcctgtccgttccattgcagtcgacgaccatcgcgatgtcgatcttgccctcttcgagcagctcgatcgacttcctgcctttttccgaatagtacttggtcattacataggggttctcgagcttgagccgcgataccgatttgaacaggatttcgctcatcaggtcgacgatgtagggttcctggatggtgagcgcctcgatgttctgcttcgatatctcgtgcacgcgctttacagcgtctttgtacaggtggtgaatctggatggcgtctttgagaaacgcagcgccggcagcggtcatttcaaggtctttgctgcgtgtgatcaggtcgacgtcgagttcttgttcgagttcggagatgtgcttgctcagggtgggctgcgacatgttcaggttgttcgccgcggtggtgaagttcaagtagtgggacaagacgatgaactcgtacagggattcgattttcaatgcagattccccctttttcggattgctccttgtttatcacattgtatcacctgaagcgctgctctttccctgcgtccggcatcgcccgacaacgaaacggggccgggcgcaatgcccggccccgccgttttttctggagccagtgacaggattcgaacctgcaacccgcagtttacaaaactgctgcgctaccgttgcgccacactggcacgtcttagggacgcgaaagcgtattgtacgataaaccgcagaaaaggaaaagcagaacttaacgcgtcccgcattgccccattcgttctacaccgtgcccatttcccatgagttcatgtacttgatctgctcgtcggtgagcgtgtcgatcgtaacgcccagggtttcgagcttgactctcgcgatctcgttgtcgatgtcctcgggtacgacgtagcagtcgggcttcatatccttcgcatgggcgagcatgtattcggcgcacagggcctggttcgcgaaactcatgtccatgaccgatgcggggtgcccttcggcgcccgagaggttcacgaggcggccttcggccaaaagcacgatcgtgcggccgtcttcgagcgtgtactcgtcgaccatcggcttgagctcctgcttcttcgttgcatgctcctcgagccacgggatgttgatctccgaattgaagtggccggagttgcagatgatcgcgccgctcttcatgttcttgtagcacggctcgtcgatcacgttgaggttgccggtgacggtcacccagatgtcggctatctttgcggcctcttctcgcggcatgacggaaaacccgtccatatgggcttcgagcgccgcagtcgggtcgatttcgcacacgacgacgttgcagcccattcccttcgcccgcatggcgaggcccttgccgcaccagccgtatccggagacgacgaacgtgcgcccggcgagcaggcggttcgttaggcggacgatgccatcgagggttgattggcccgtgccgtagcggttatcgaagaaatgcttggtcttcgcctcgttgacggcgacgatggggtatttgagcgcttcctgcttcgccatggcctcgaggcggattacgcccgtcgtggtttcttcggtgccgccgatgatggatgcaagcgcgtcgggacggctttcgtggatgcgtccgacgacgtctgcgccatcgtccatggtgatctggggcttggcgtcgatgatcgcatcgacgtggttgtagtaggtttcagtgtcctcgcccttgatggcgaaaaccggtacgccgtagtgcttgacgagcgcggcggcggtatcgtcctgcgtcgagagcgggttcgatgcgcacagatacacttcggctcctcctgcgacgagcgtgcgcacgaggttggcggtttctgtcgtgacgtgcaagcaggcgccgatcctcacgccttcgagcggacgctcgcgctcgaaacgttcgcggatgcttgccagcacgggcatgtcgcggtctgcccagagtattctttcgagtcccgcgtcggccagttcgatgtctttgatgtcgtattccatgattgtcctcctaaaactacaacagggtagcatatggattgaatctcatggtcgccaattatggaggcggtgtgcagaacctctgttgaatacggcgattcgcgcgggaaattcggaagaaaaggtaacgaaggtggcatcttcggggacttttcaagtcgaagtgactataatttgtccagcttaaacacccctcacatgctccctctggcgcagaagcccttggaataccgtgtgtcgggagaggaaggcaggcgacgtatgggacggcgcctaataaaggagcttaggaaaagtgttcgaccaattcttttcgcagatatcgtttgttgacgtgttcaacttctgcgtgttcattacgttcagcatctgctacacctaccagctctattacgtgttcgtggtgctgacccgcaagcctcccaagcatgtggctgaaaagaatcatcggtttgccgtcatgatctcggcgcgcaacgaaagcgcggtcatcggcgatctcatccacagcatcaaggtgcagaactaccctcaagagctcatcgatatattcgtcatcgccgacaactgcgacgacgatacggccgaggttgcacaggaagcgggtgcgacggttttcaagcggttcaacaacaaagaagtggggaagggctatgccctcgactacggtttctcgtgcgtgcgcgaccgctatgccgatcgcggctacgaagcttatttcgtgttcgacgccgataacgtgctcgacgtgaactacttccgcgagatgaacgcaacgttcgattcgggcgcgaaggcgtcgacgagttaccgcaattccaagaactacgattccaactggatttcggcggggtatgccgtctggtttttgcgagaggccaagttcttgtcccaagcgcgccttacgctcaacacgagctgcgccatttcgggcaccggtttcttcatcgccgccgacataatcgaaaagcacggcggctggaaatggcatctgctcaccgaggacatagagttttcggctcaaagcatcctcgacggcattcgcatcagctactgcccgacggcgattctctacgacgagcagcccatcacgttccgtgactcgtggaaccagcgtttccgctgggcaaagggtttctaccaggtgttcgcccactacggcgcgcgcttggcgaaaggcaccgtcaccaaccccaagggcaagcgtttcgcctgctacgacatgctcatgaccattgctccgggcatgctgctcaccatcgtggcggtcacgttcaacgcaatcatcctcgctctgtcggccgcgggcctcatgtcgacgggcatcgccatcgcatcttcggtatcttcgatcttcttctgcctgttcaactaccttgtgttcatgttcatgttcggcgtgcttaccacgttcgtggaatgggattccatccattcgaccacggcgaagaaggtgcgctatatgttcacgttccccatcttcatgctcacctacattcctatcgcgctcgtggctcttgtgaagaagtgccagtggacgccgattcgccacagcatttcggtggatgtggcggagctttccgatgctcacagccagaagaagggcgagcgcatctagccttgcggcgggcatccgcccgcacgcttagccaaactcctagacggcggcttcggccgccgtttctgcgttcggttcgttttccagggcccggttcaccagacgcgggcgaacgtgaggcagctcacttcgttgcatccaagcgcgccgagcgcatcggctgcatcggcgagcgtcgctcccgttgtgcaaacatcgtcgaggagcagtacgcggctggggctgcgcgcgcttgcgagcggggaaaagcgcccgatcatgtttcgggcacggcccttcctgccaagcgcccgctgatcgaggcttttcgggcgggcgagaagcggctcgacgccgatgccgagccgctcggccgtcgccgttgccaaaagctcagcgtggtcgaacccgcgccgcccgagcgccgagcgcgttgccggcacgaatgttgcgaccgcaggatcgccgcctgctcgacgcagccattcaggcgggacgagcggagccatgatgcttgccatggattcagccaggcggcgctcgcccctgtccttgtacgcggcaacgatgcgcgccgcatcggatccgtactcgatcgcgcttctgcatgcgccgtacggcagggagctccttccgagcgatccgagcatgacgggattgcattcggtgcagagggtcgagccgaacggcgcgccgcatcgggggcacgcacgccagtaatcgatgaagggaagcgatcggcgacagcgctcgcacagcaccgatcccggttcgtcgcatacggcgcagcgggtgggccagagcgtttcgcatgcggcgcgcgccagaagcagcccggctgttgcggcaaggctcgctcttgcggttgtctgcactcggttcatatgccccagcatagcgggtccgccttgcacggcgaaggctgcggcttcgccgtgccgcgacgccgatccgacggggtttgcagtgcgatcttgcccggatggagtctcggtcttgcgtcaaaacgatctcgatcttacgagcgcatgcctgattgtttgtctttcgggggcacacccgatgcgagttgggtgcgcgcgtacaccgagaggctgagccgaggcgtcgcactgcgcattttagatgcgtcctcctcggcgcagggcatttctgctacactagcaagcacgcttctttcgagtctgtagttgcgggattattccctagtccacggcagatgcggtcgaaaggacccacgtaagttatcgggcggcatgccgcgcggtaacgagcatggcgcatcctagatgtaagccgtaccgcccgttttatgcgcgacatacggttgcctcgggcgagagggtcatgggtgcaagctcatccccggtacgcgggtgtgggggcaaagactaggtcagtcgaaggaagcgcacatggcaataactagatggaggcatagcagtgtttaagcgtctaggaacgctcgtgctcgggtgcatgctggccctcggcacggcttttgcgctggcaggttgcgcgacccaggattacaagccgtcggagaagaatccttcggtttcccccgataccattatcgaggaaggcgtgctccgcgtaggcgtcaccgccgagaacaacaccccgttcgccggtcaggcatcgggcaagatcgtcggactcgacgttgacattgccgcagctcttgccgacaatctgggtctcaagctcgagatcgtcgatgtgggcaccgatgtcgatgccgcgcttgagaacaagcaggtcgatatcgtcatgggcgtcgacaagacgagcgcgcaggtgaaatgctggcgttcggaggtgtatgtggaaagcgccgtcgcgctgttcgccgcgccgtcgacgaccgcggttcccacaaaggattccgctcccaagatcgccgcgcagagctcatcgatgagcgcatgggaagtgaccaatcaattcggcgacgacgctttgagcgcgacatccgatctgaagggcgcattcgaagccgtcagctcgaattcggcgcaatacgcagctgcggatgcggtgatcggcacatacgccgctcatacctcgaacgtcgatgtccatatcgtggcgctcatgcagaatccgagcggctattgcatcggcgtgctcgacaccaacaccgacctcaagaccacgatcagcgatgcgcttgcgagtctgacgggcaacggaatcatctcgctggtcgaaagcaagtggctcggtacggctgtcgacctttcgaacattcccctgacggcgggcgcggctaacgcgaacgccgccgatacgacaaccggttcgactgacggggccgatgaacccgcagacgaccagggcgatgcggccgacgcttcggctgacggcggagagagcgccgattccgacctcgaaccgggatccaatgccgtgcagcaaccggaaggaacgggcgattccgcgtaaagcgaaaggcctttgcagcttcggtaagccgtttagatcgattgaaacgagaaaagcccgcactcgcgggctttttcatgcggcgtgcccgctgtgagaatcaacggacacgcaagcgcgcggccgacacctgcctgtgcgataaaaataggcgctgaactgcttcagcgcctatgatcgtacactatgcggcttgtgcgcgcctatgtgtgaatcagctcaagaagtcctctaggatctcctgttcagcctcttcttcggtcaggccgagggtcatgagcttcgtgatctggtcgcctgcgatcttgccgatggcggcttcgtgcacaagcattgcgtcttcgcttgcggcttcgatgccggggatggccgtgactttcgccttgcccatgatgatggcgtcgcactgcacgtgcccgcggcattcggcgttgccgatgacgagcgggttgaacacctgcaccgagttgtcctgcgcaacgctgcgcgagatgacctgcacgctcgaaccttcgccgttgagctcgaccttcatgttcgaggtggcgatctggtcgtcgtgggtcaaaagcttttcggtcagtacgagcttggcgtcgcgtgcgagcttggcgttcgtgtcgcgtaccgtggatgtgacaccgcgcagctgggtgagctccatctcgcagctcgaaccgtcttccatgtacacgttcgtgacggggttcaggatgcgatctcccgtgcccttgccttctccgtaatgcttttcaacgtagcggacgtgggagttcttgccacagtagaagctgtgtattccgtcgtgttcggatgcctcgtggctttcgttgtggatgccgcagcccgcgatgatggtcacgtcgcagtcatcgccgatgtagaacgtgttgtacacgacgtctttaaggcccgcctgcgtaacgatgaccgggatgtagacggtctcgcctttggtgcccgccttgatgtggatatcgatgccgggattgtcggtttttgtggctatctcgatgttggccgatgagtggcgctcgacgagttggccgtctttgcggatgttgaaggcgcctttcggcatgccgtggatgttcgctatttccgccagcagcccctcgtcgatgggggataaatcgactgccatggttactccttacagttgcaggttttgcagacggcgggttagcacgtcgtcgggatttcggtcagatgcagctcgggcggctgcgtgaagttgcagatggggttgtctttcgccatgaggccgagctgggggatcagctcggtggcggggccttgcgcctccacgcggccttccttgatccatacgatgtcgtcggcaagctgaatgatgcgctcctgatgcgagatgatcacgatggaacggccgtcgcgggcctcgtgtatgtcgcggaacgtctcggtcagcctgtcgaagctccacaggtcgatgcccgcctccggctcgtcgtaaattgcgagcttgggatcgcgcgcgaggatcgtggcgatctcgatgcgcttgacttcgccgcccgagaggttcttatcgacttcgcgggtgaggtagttggccgagcaaaggccgactttggacaagtactcgttgcaggacagcatcggaagcttctttcccgccgcgatatcgaggagctttttcaccttcatgcccttaaagcgggcgggttgctggaacccgtagccgatgccgagcttcgcgcgctcgtcgatgggcagttcggtgatatcggtcccgtcgaagacgatagaacccgatgtcggcatctcgacgcccatgatgagcttggcgagcgttgacttgcctccgccgttggggccggtgataaccgtgaacttgtcatcttcgatggcgagcgacaggttgtcgattatgcgcctcttttcgttcgagccctccgaaacggggacttcgaacacgaggtccttgatctctaacatgctatactccgtctctcgtgcgatttgatactcaataagtaacattcaaggcgcgtaccgtcaagcatcaaaccgatcaatacttttcactggctcattctaccgttaaatgccagcgtgggcacgtctttttacccgagcaggtcgatgacttcgtaatcggacgaagagccttcaatgatgccgcggttgccgaatgcgcagcgcacgtcgtgaccaatcacgcgagcgagctcttcgccgtgccgacgcagtttgcccggggtggtttccagcagctgctcgcgggtcttttcgcggtatcccgccggtcgttcgcagaagaaatcgccgtcctggcgccgtgccatgtcgcgcggtttgacaggcgcgtccatgcccgcgaccgagctgatgatgtagcctcgcatctccgactcgtcagggtcgaacgaggcgagccatgccgctgcgccgtcgaagcgggctatcgtctcgtcgaggttgggatcgcggtaggagtggaactgcatcgcgcccgagcgcaacgcccggaatccggctccgtaggcaccgccttttacgcgcacctcgttccagagatagtcgtaggagagggctttcgaggctacctgccagcttccttcgtaggatattccctcgagccgcgcattgtagccctttgcggcgaagcacacgtcggcgggcacgatgaacgcctcgttcaaaacgcgcggttcggggacgacgagggcgttcggttcgtcggagcggtcgagttcgagcgtgcctgcgagctcccagaagcgggagcggtcttccggggcgcccgtgaagctcacgatcgttccgtcgacggcgaatatgcgctgcgctgtgctgcgaagcctttcgaccaacgcaggaaaccgcgcgtcgaaatcggcgaggaggcttttcaggaaccggtagaaatcgacgccgctcagctgctcgcggatcagggccgatttcgatacgtaggacgaacagcgcaacagcgccgaggagttgcctgcggtcgcgtatccttgttccatgcggattctcgtctgcgtgagtatgtcgcggattttttcggggttgtcgaaatcagtcgagctcctgatctcgagcggaagatctacggcgtgggcgatgttttcggaaagcgagctggtggctatcacgaatttgggagagatcgcatcggcgtcctgctcgcttgcgtacacatcgacgaagaaacgcaggcttcccaggtaggtttgggtgagcttgtcgagctcctctgcgctgtgcccgcgcgtatcgagcttgccaagcagcatggccaaaagcgtcgcgtaaggcaagtcttcgaaagaaagcctgcccatatcgaaataggcgaacacataatcgatgccccgggtgggaacctcgtgatacaaacacggcaggggggtgctgtcgatgcgcttccaggcgggctgtacgggcgcttcggcgatgtcgtcgagcgtgagcagcggcagggttgcgagcgcctcgggggaatcggggtcttcttggaggcggcgaagcgcggccacctcgtccatcaccgattcgatgtcggcttcgtccatggttttcctcacggccgcaaggcgtgcctcctcgcagttctcgtcgaggctttccaccggctcgaggatggcgagcgccctatgatcgttttcgaggacgatttcgcgcaacaggttttcgaagtagccttccggggcgcggcggcgcagctcggcgaacgcgtcttcgaagcgcaggtaatcggttgccatggagtcgtcgtagagccacccggccatcgcgctcatggcgagcaccacgccgtcggcggttccgaaatcgcgctcgcgcagcaggaactcggcgcgagcaagcgatgcttcgatgcgttcgggatcgaagccctcgtcgaccagcatgcgggccgtctgctcgaccgtttcgcaaaacgcataggcggtatcgggcttcgagccctttgtcatgacgaacagcgccggctgaagctgcgcgtcgatgagatagccgtctacgtcgtcggctatgccggctttgaggagggctttcttgagcggcgcttcgttcgatcccatgagcacgtcggcgaggatgtcggtggcgataacgcgcagccgatcgcttgcccgtccgatgacgtagccaaggcccatcgcagcgttttcgggcgcggtctccatctgcttgacgacatcgagattcacgacgggagcctgcagctcgagcgggttgggcgctcctgcgggcttctgctcttcggagagatagcgttcgtcgaggaatgcgagcatgcggtcgatgttcatatcgccgtacagcacgatgtagctgttgtcgaggcggtagtgacgggcatgctcgtcgaggaactgctcgtaggtgagctcgggtatgactgcggggtcgccgcccgattcgtgcgcgtaggcggtgtcggggaagagcgctgcggaaagcgcgttgtaaagcaccgaatcgggatcggaaagggcgcccttcatctcgttgtacacgacgccgttgtagcgcagcggctcgtcgggcccgtcgatctcgtagtgccatccctcctgctcgaagatggcgcgcttctcgtagatcgcggggtggagaacggcatccatatagacgtccatgaggttcagaaggtcctgctcgttggtgctcgccaccgggtacatcgttttatccgagaacgtcatggcgttcagaaacgtttgcatggagcttttgataaggttgacgaagggctctttgacggggaatttgtcagagccgcacagcaccgagtgctcgaggatgtgaaagacccccgtactgtctgcggggggagttttgaacgcgatcgagaacgctttgttttcgtcgtcgttctccagaaagagaagcctggccccgcttgccgtgtggcgcagcgtataggcgcggccgtcgatttcttccaggttttcagcggattcgactctgaatccgtgcagggtcatgccgatttcgagattcaaggcaagccgcctttctgtgtgtggcgcggcgtgcggaagatgcttgcggcatcgatgtttcctcgtcggtgcaagcatccggcaaccgtgcgtatccgtttcgtgtatcgccgcttatgataccgctaaaccggacgcgcggcagcgcgagtagccgatgatcgcgagaaccgtagggaatcggttaccgggggcgtcggttggggctgggtggagcttgcgtccgaaagccgagccgctgcagcttgcggcttcaagcgagtgcgtgcgcactcgggcttcccatggccggcggcgccgagcgcgacctaccgcgcggttcgggccgccatcgccttcgctgcgagtgccgtttgcacaatgccgacgaccaggtagaaaaccgaggcgacattcgggaggtacagcatttcgaacgcgcaccagccgatgaggaggattcccgcggccagcgcccaggcgcaggccgcggctttacgcgaggaaaacagcgcggtggcgacgatgttcgctatgccgttcacgagcagcagggcgagtcccggccagaagaggttttcgatcatgaagccgggcaggggcagcgcctgcagtgcaggcacgagatccgatagccccatgggcgcatcgtctgcccagatcatcatgatcatgccgaatatggcggcgcatgcgccgttgagggtgcagataatgcggagcgcgatctcctgctttcggtcgcaggtcattcgcctgctcctctcacgcagtcgagcagcggtgcgatgaaggctctttcggtaccgtcgaatccggctttcatctctcggtccatcacggctattccggggtcgctctcggcgagcttttcggtgcgggaaaagaacaccttcatcatggtgcggtcgagcgccccgagcttgtccatcgagaagcccccgcgcatgtaaaaccagggaaggtcggggtattcggcttcgggaaacgtccgccgcaccgcttcttcgatctcggcggacgatccgccttgctcgggcatggggctcgccccggtggcgaacagcacgaaccgtttctcggggtgcgcggcgatctgccgcttgagccatttcgcacctggaatcgatgcggcatgaaaccagcttccgaatatcacggtatcgaaatccgccagatcgacggcgtttcggttcttgtaggctatggcatcgcatccgatgtcttcggcgatccatcgggcgtagcgttcggtgtggccggtttgcgaacagtaaatgacaacgggtttcatggaagctcctttgcagttgcgtgcgagaggtagaacgattcgagatgcgcttcgatcaggggtcgggctagatcccatgacgtcccatcgtgcagcatgaggaacacgggcccgtagaattcaagggcgagaagatgggcgtcggcccgatcgaactccccggttcccatcaagtaggcgaaaacggtttcctgcagcctgatgggctgttcggcgaaaatgaggcggtaggcgcgcgtcgtctgctggttttcgaactgattgatcacgagcagcttgcgcaggcgcaccatatacggatcgcagaaaagaaactcgaacgttgcgagcaccttctcgcgcaactggtcgaaggggatgctgccgtagccgctcgcatcgtcggtcgtgaggaacagggcccctcggctccgaaacccttcgcccatgctctcgagcgcccgttcgataatggaatcgaatatcgcctgcttgctggggtagtggctgtacagcgatgcatcttttatcccgacggctgcggcgatgtcgcgtacggtcgtggctcggaatccctgttccgagaaaagccgcatggcctcgtcgagaatgacggtttttgtatcacgggagcgttcctttcgcatgaagcgtctccttttgcggatcttgggcggcatcgcgcgtctctgcaatcgccgtgggcgccgatgccggcggcgagttcaagctagcgttcgctagccacaatactagcaaatgctagctttgtaaagaggaaggttgatggctttgccagagcttctcgactccatggggcgcatggttcgaaaaaaccgcgatcgcctggctcgttcggcaagccgaccgactggaagcgatgcatatcggatggaatgttgcttgcgcttatcggaaagttgtgtatactagccccaacccgaatgaaaggttcgcatgtaccaggccaagaacaacagcttcatgatgaacgcgcagagcgcgtctatgaactgtgcttggtggtggaacggaacgcaataattcgggttatcgacagcttctgttctcgcttacatacaaaaacgaacagctctcggtgatccgggagctttttttgttgcccgaaagccgaagctgaactcgaaacgaagcaggcgagcgggcgtgcaaggccgaaaccgaagcgcaggtacgcaagagttgaaagagaaaggaaccgcaatggaaaacgcagtgccgcaccgtctgtacctcaaagaagatcagattccgacgcagtggtacaacctgcgcgccgacatgcccgagccgcccgatcccatccgcctcccgaacggggagatcgccgagcccgagcagctcgcgccggtcttctgcgacgaactcgtgcgccaggagctcgacgatgagacggcctactacgacatccccgaacccgtgcgggaaatgtacaagatctatcggccctcgccgctgtgccgcgcctacaacctcgagcgcgcgcttggcacgccggccaagatctactacaagttcgagggcaacaacacgagcggctcgcacaagctcaactcggctatcgcccaggcttattatgcaaaggcgcaagagctcaccgatatcacgaccgagaccggggcgggccagtggggcactgcactcgcagaggcggccgaccacttcgggctcaacctcgatgtgttcatggtgaagtgctcctacgagcagaagcccttccgtcgcaacatcatggaaacgttcagcgccaacgtgacgccgtcgccttccgataccaccgagatcggcaagaagatgctcgccgagaaccccgattcttccgggtcgctcggcaccgccatctcggaagcggtcgagcgggcgctcaacgtgcccgaaaacaaaggacgctacacgctcggctccgttctgaaccaggtggtgctccaccagagcatcatcgggctcgaatcgtacgaggcgttcaaggagctcggcgagtaccccgacatcgtgatcggatgcgcgggcggcggttcgaacctcggcggcctgatcgcgccgttcatgcgagacaagatcaaaggcatccatcccgatacgcggttcatcgccgtcgagcccgcgagctgcccgtcgcttacgcgtggccgctacgcctacgatttcgccgacacgggcaagacgtgcccgctcgctaaaatgtacacgctcggcagcggttttcttccaagccccgaccatgcgggaggcctgcgctatcatggcatgagcccgatcgtctcgaagctcaaagcagacggctacctcgatgcggttgccgtgaagcagaccgacatcttcgccgcagcggtcgagttcgcccgcctcgaaaccatccttcccgcaccagagagcgcacatgcgatcttccaggctatggaggaggccaagcgctgcgccgagacgggggaggaaaagacgatcctcttcggactcacgggcaccggctacttcgacatggtggcctacgatgcgtacaaccgaggcgagatgaccgaccatattcccaccgatgaggaactcgaggtggggttcgcttccatcccgagcatccccggggtgcagtagatccgtcggcctgccgcgggtcattctgcggcaggccgacgaaacaaccaggtgcggaagcgaaaagcctgcgatttgcacgaaaattgccagattcatacatccagggggttcgggagcgttcccgagcccttgcattgcgcacgatgcggaccgttttcccagttcgcgaataacgcaggcgttttgcggggcggaaacgggcgcgaaggggatctccgacgtcgttcgaaatgtatgaatctggcaataaatgtgcacatggcacgcgatggcggtcgcgccggccgaaagcgggccgactcgcaggcaacggggccgtaccgtttgctctcggcatctggcttctcgttttgcccgtcggtatactgtctttgcagacaagaccttcattgatttcggagagctgcggaaggggtgggccgatggcggcgtcaacggctgcttttgccgatatcgtattctgcgcgcttctcataggggcgtggtggtggaacaggcggcagaggtgaccgccgctctgtttcgcgtcgaagacatgaccgtgtcgtacccgcgtgcttccgggcgcgcgaggctcttcgcggggttgggcttcgcccttgacgaggcgaccatctacgatcttgtcggtccttccggctcgggcaagtcgacgcttcttcgcgcgtgtgccctcatgatcgagcgtgaaagcggacgcttgtatcttggaggcgaatcgagcagcgatatgccggtgacccagtggcgcaaacgcgtctgcctggttccccagaagccctcgctcgtatccggtacggtgcgcgataaccttgtgcttccatggacgctgaaggttcgcgcagacgagagcgcaccgcgcgacggcgagctcgccgatctgctcgtgaaggccgagctcggcgacgttgagctcgagcgcgacgtctcgcagctttcgggcggacagcttgcccgtatcgcactgttgcgcgctttcgctgccaagcctgcggtattgctgctcgatgaggtcgatgcggcgctcgacgccgattccgcttgcgcgatcggacggcttgccgcgacgctcgtcggcacgggtatgacgtgtctgcgcattcgccatcgcgccgctgacgggttcgctgcaggaaccttcgagctcaaagcgggctcgctttcgtacagcgagaacgccgggggcgctttgccgtgcgcccgatcggctgaaaggcccgagggcgccgaagtagcggaagcgcccgtttccgagggcgccgaaacggcggccggttctttcggaggcggcgagagagccgtatccgcaggaggtgcgcgatgagctcgggcgtcgtggagatcgggtatttcgagctcttcgcagcgagtgcgctgatgctcgtggcgggcctcgtttcttacaagctcgaactcgggcagaccaagcgcatcgccgtatccacggcgcgctgcttcatccagcttcttgccgcgggcttcgtgctgaaatacctgttcgagtggcagacatggtggctcgtgctgcttgcgctcgtattcatgatttcggctgcgacccagatcgccacctcgcgcgtcaaaagcgagatcaaggggcttgttcctgcggtgttcatctccctgttcgtctcttcggtgacggttgggctcatcgtggtggaaggggtcgtccatgcggagccatggtacaatgcccgccagctcgtacccattgcgggaatgatcatcggcaacgccatgtctgcgatcgccgttgccatcgaccggctgttctccgatatggattcccgctccgacgagatgttcacgctcgtggctctgggagcaacggcgcgcgaggccgcgttcccttcgatcaaggcggctatcggggcgggcatgacgccggtgcttgcgacgatgtcggctgcgggcatcgtgacgatccccggcatgatgagcggtcagctgcttgccggagccgatcctcttgcggcagcgaaataccagatcgtcgtcatgctcatgctgtcggccgccaacacgatcgccatcgtcatggcttgcttcctcacgtatcgcaggcggtttagcgccgatggatattatttggacaagggcattcgggaatagaatcaatctataatcgctctaaacgcgaaagggtgcccatggatcgtgaaggaacatactctctcatatcggtgaacgccgatgatgacgaggagatcgtcatccagacgggcgttgcccgcgaatcggccgagaagccgggcgatggcctcccggagaaaagcgaatgcgaagaaggccgcgtcgaaggcgatgagccgggggccgtcttcgagacggagcccgagggcgaggccgtcgtcgcatcgccgccccgaaagcggcgtgcgccccgcgcgggcgaacagcgttatcgggaaacgacgcaggaggatctcgacagcgtcgaaccgatgtcgaaaatgcagaagatcgttttgggctgcatagttctgcttattgtcggtttcgtcgtctactacctgttcttgcggtaaaatagcgctgccctcgtgcgcttcgggcgcagaatgctaggaaggtttacacgatgccaaaacatgcacgaaccgattcgaataccgaagaatttcttgaagacgaataccccgatgcggtcgaaagcctcgagcccgatgtgagcgctccgatgctgatcggcgatcgggaacccgctcaggcgggcatggtggttgccgagcagaaaggcggtcgcggaagacacggcgataagaagcccaaacccgagctctccgctcagcagcgcaaatcgcgccgtatgcgaaggctgctcatcgtggtcgtcgtattgctcgtggcattgatcggcgcgctcggctacttcacgtggatgctgttccaggaaagccagaatctggcgactcagcaggcgcagcagcaaagcgaccaggaggtcgaggcgctgcagggaagcgaggcccaggacgcttcgacgatcgcgacgaagaccaccgaagtccccgatttgtctcagctgatggggatgacgcaagacgaggcggttgccgccctgaagcgcggtgccaccgttaccagcgagcgccaggtcaacgaagagggcaaccccgtcaaaagctcgctcaccgtggccttgaccgacgaacccgcagattcgcgcctcggtacgccgacggtgtatctgggtctcgacgaagacggcgccattgtcatgacgggctactccgccgcgatgtcggccctcgggttcggaacgctgagtttcgccgatgcggtcaaaaacgagaacatcgtggaaaagacgctcggcgaagcgggaatccaggttgaagccggttcggcgaagcttcccgaagacaaatcggagtactctacgtacgcatcggatggaacgacgctcgtgcaggagaaatgctcgttctcgggcaccgtcgtgatcgacgaagtcgaatacaactggtctgccgtgctcatgtacgattacaagctcgcgaacgcttcgggcaatctcgccgatacgattcgccagatctacatctaccttgaaaccccgggggcggagatcgaggagcccgcggaaggcgaagcagatgcggagacgcaggcgtagcgacggcgcgggcgcggcgcgtctgcgggcgcgggccgacgaagggcatgtgcaacgcatgcgcccatcttgcataagtgccataatgctgattgacctcgcatgatagagcgtgttagagttctcggtaccagtactttcgtctacaggaggttcgcggtgatagacaagcgcacggtatccgccatgttgttggaaagcgccgatctgctcgcttccgagagcgatcttttgagcgagatcgactcgaagttcggcgatggggatcatggcatcaccatgttgaagatcgccaagctgatcgagcaggaagttgccgcatgggatgacgagtccatcggaagcttcctcgacggactcggctgcaaggccatggaggtgcgcggcggttcggccggacctctatacggcacgctcatcagcggtctgggcttcgaattgtccgacgatgaggacgagctggggcccgatgcggtgaagcgcatgttttccggatgcctttcggagatgcaggacatcacgacggcccaagtgggcgataagaccatgatggatgcgctcattcccgcgtgcgaggctgcaaaggcggcggccgatgatatcgaggcgatcctcgaggcggctgacgatgcggctgcgggcggcgcgagggattccgagcgctaccaatcgaagttcggccgcgcgaaaagctacaaggaggagaccatcggcactcccgatgcgggggcgatatcgacttctctgttcatccgcgggctgcacgagggttatctgaaggccctgcaatcgcactagagcatttggcattatcctgccgcccgacgggcggcaggttcgtttcgggcgcatgtgcccggctaaggcatccgtacgaaggaggagcatcatgaagatgaagaaattcatcaacgatcccgacgatctcaccgccgaattgctcgagggtctggcgatggccaattccgacattctcgagctcggcgagcagaacatggtaatcaacaagaagctcgccgatgccgaccgcgtgaccatcgtcacgcagggcggaagcggccatgagcctgcgatcgagggcttcgtgggcgagggcatggtcgacatcgatgtggtgggcgacgtgttcgccgctcccgggccgcaggcttgcgtcgatgccatcaaactggccgacaagggcaagggcgtgctctacatcgtgctcaaccatgcaggcgacatgctcaccggcaacatgaccatgaagcaggtgaagaaactcggcctcaatgccgtgaaggtcgtcacccaagaagacgtgtccaacgcgccgcgcgagaacgccgacgaccgccgcggccttgtcggctgcattcccacctacaagatcgccggcgcggcggcggcggagggcaagagcctcgaagaggttgccgccatcgcccagcgcttcgccgacaacatggcgacgcttgcggtagccgtgcgcggcgcgacgcatccgcagacgggaaccctgctggccgatcttggcgatgacgagatggaaatcggcatgggccagcatggcgaagagggcggcggccgccagcctatgaagtcggcggatgaaacggctgccattatggtgaacgcgcttgtcgccgatatcggcatcgaggacggcgagaaggtcatgctcataatcaacggatcgggtgcgacgacgctcatggagcagctcatcgtatatcgcgctgccgtgaaggagctcgagaagaagaacatcgaagtggtggccaatttcgtcggcgagatgcttaccgtgcaggagcaggcgggtttccaaatgttcatggcccgcatggacgacgagcttctgcgcctgtggaacgcaccctgcaacacgccttacctcaagaagtaggccgccatgctcgcttccatgaaagaggttcttgcttgggccgagcgaaaagggtgcgcggctgcggcgttcgatacgcccaacctcgagctgctgcttgccgccatcggcgccgcggaggcccgcagggagccggtgattatccagcatgcccaactgcacgagcatgagaccccgatcgacctgataggccccatcatggtgatgtgcgccgaaaaggcgagcgttccggtgtgcgtgatgctcgatcacggcgaagatatggagtacctgaagcgcgctgtcggtttgggctttacggcgatcatgtacgacggcagccaagacccgttcgacgagaacgtgcgggtaacgcgcgaggtgacagacctctgccacgggcgcgggatcgatgtggaggccgaaatcgggttcacgacggggcatgagggcctcgaaaactcggacgacgatcgcgagaacgtctacaccgacccggacgatgccgtgcggttcgtagagctgaccggcatcgatgcgctcgccgcttccgtaggcaccgtccatggtttctacaaagcagcgccgaaactcgatttcgaccgcatcgccgagctcaggcgccgttgcggcgtgccgcttgtcatgcatgggggatcgggcctttccgccgaagatacgaggcgggcgatcgaatgcggcattcgcaagatcaactatttcagctacatgagcaacgcgggggttcgcgcggtcgaagcgcttatcgccgaatcgcatccgaagtacttccattcgcttgcgaacgcggctgccgaggcgatgcaggcagatgccgaagccgccatggaactgttttcgatgaagtgacgagcccggcggcttgcgagtcgccgggaagctggagccttcgcccttcggggttcgacgggctcccggatcggcgccgtagcgcgccgctgcgaaaggagagcgatcatgccaaccgcaacttacatgcatgtcggtatcccgatcaccgagaagaagccgaacatgacgtacaacgaggacatgaagttctgggtatcgaacgtcgatgattacgactacaagatcgagtacctcaaattcgaagagggcaccccgtttcccgaggagcttcatcgccgctggcatgtggcctacgcggtcgacgacctcgatcattacgtcgatgacgccgaccgcgtcatctgcggacccatggatgcgggtccaggcgtgcgccttgccttcgtcgagaaggacggtgcggtgatcgagttgtacgaggacaagaactagctgctttggcgtcaaagccgaagcgctgccgaggcgcccgcggcgatcgcgggcgcctcggttcgttcgagccgcgccttgcgaggctcgaagcggtttgcgaatctacagtgcggcggcgttcttgccggcctttcttccgaaatgggcatttgaggccatggccgtgcccgatccgggatagaacgggccaacccagcctccggtgcagaggcctgcggcaaacaggtgggggatctgcgacccgtcgggacgcagtacgtgcgcttcggtgtcgatgcgcagaccgccgcacggtcccatgatctcgggacgcatgcggtttgcgtaataggtcgctccctcgatgcgctcgaatccgctgatgcggccgtactgggtgtcctcaccggcaggcaccactgtatcgttccagtactggatggtgttggcgaggcccgctgcgtcgacgccgatctcggccgccagctcctcgatcgaaggagcggcgataacggttcccgctgcaacggcctcgttgatggtggtcgcatcccatgcgcggcagttctcgagattgctttccgcccatacggcgtagcagggatgccccgtcgaacgttccatttggaactgcatgcgcgtcttgtaggcgtaatgggcgtcttcgcacacgtagcgcatgcccgccttgttgacgaagatgagcccccaaacgtctttgcccgaggtgagcttcagatcgaggatggcatccatgccgctgccgaggttgcggatgtcggcgccgatctccatgcccatgcggatgccgtcaccggtgttggtgggagcgctcaggcaatcggcaagttccatcgcccaaacctgctgcgggcagaactggcgggccatctcggtgttgtgatcgatgttgctcgtggcgatgacgacgcccctgttcgctttgatggtctcggctccctttttcgtttcggcttcgactccgataaccgtgccgtccgaatcggtgataaggcgggtcgcttcgatgttggtttcgatgacggcgccgttcccttccgccttcgccttcatggcggcgatgaggcccgctccctcgccgtcgggacgatggatgcgcaccgcgtagtattcgtcggcatatggtacgtgcgactggcccgagaaatcgccgatcgtgatgccgagatcctcaacgtaccagcggatgacttcggggcatccgaaggcgaggtccttgacgagctcttcgtcgacccactcttcgccgagcgccatgtaccatttgaagtggttttcgggagtgtcgtcttggtattcggtgaacttcttctgatactcggttcccgcagcctgcgtgatgccggcggaaagcgccgtcgtgccgccgatgacgcctcctttttcgagcacgagggtgtcggccccggcacctgccgcttcgatggccgccgaaagacccgatccgccgctgccgatgacgatgacgtcaacctcgcgatcccatgattcgggagcggccgaagcttggccgctcgcttcgccttccgctttcggcgcgcatccggcaaggccgaaagcggcgagtcctgctgcgcttgcggctgctcccttgagaaagtcgcgccgtgccagagaggttggtttcgagatttccatgatgattcccttcctatgttgttctgatccgatcgtccggccgtccgacgcggttgtgcgaggggcaggtgctttcgtttgcgtcgggcggcttcgaaccgaggacaccgtacagccgcgttgctgcgcacggttgtttaaacgtgtttaaacgttgtacgggatgtttaaaacgggtatcatccgtgcagtgcatgcgtcggatcgagcgcttggggagtttgggcctgtggatcgctgtcttggaaagctgtttgcgtttcttgggaaaaacgcgctgatcttctatgctggcatcggcatgggcatctaccgatgcgcccacgaatggccgctttggttcaacgcgacggtgacgcaggtaggtgtttccccgctgtttgtcggcgactttttctttatgcttgtcgacatcgggaaagcggtgggcttggctgtgtatcttgtcctctgctatcggttcgacaggcatcgtgcgagcggggccttgctcgtgctgccgagcgcgcttatcgcggcagggtgcttggtgccgctctcggtggttttggggtttgcgccgggcgatggcgtggtgcttgggagtcttgtcctcatcggcgcgggtgccggtatgcttttcgggcagtggatcgaattctgcgggtatcttcctcccgtgaaggtgatccaggttttcgcggtatctttcgccgtgcggttcgcgctgctgcccgtcatcacgggagtcgatgagcttttgagcacgctcgtgatcatctgcttggcgggtctgtcgtttgtgcaggtgtcgttttgcttcagcaagatcgccgttgccgaggatcggccgcgcgaaggactcggagcgaagggcctttccgggtacgggatgctgtttttgttcgtatgcgtgttcgcgttcgcctacggggtgggcggaagcgccacccagctctcccattccacgcatgagacggggttgggcaatctgctgccctcgcttgttattttgattctcgcgttcaagatgggggatcgcttcgatcgcacgatcctctatgcgattgcactccctctgatgacggtcggcctcatcggcgtcgagttcttgggggtatccctttcgctctcgcaggtgatggtcagcgccgcatattcggcattcgaccttttggtgtataccatggtgtgctcgaatgcgtatcggagcaggacatcggcgatgcttcccggatcctgcatccgcattctggcattgatcgcagccgatctcgcgatcatcctcatgcgtttgaacgtgtcatggaatcgtggaatactcgtgacggcgaccatcttggcgacgcttgccgtaggtattgcggtattcgcgcccctgctgggaagccagcgcgaattctcgcgttttctgtccgagggcgaatcgtcggagcgcgagcggcttgacggcattgccgaggccgcaggtctttccgcgcgcgagaccacggtgttcaggcttctggtgatggggaaaagcgcagctgagatcagcgaggagctgttcatatcgaatggtgccgtgagagcccattcgagcaggatctacgataagttcggcgtgcattcgcgcaaggatttcgacgcgctgttctcagagcggtgacggatcgtttcgtccgccaccgcctgcgttctgcgctcgatgcggctatcgtttcctgcgggccagcgttgccgccccggtaaccccggcgagggctgtgagggctgcgagggcgaaggcgagcaaggcaatcgggtcgttcgttttcgcgaggtcgtttgcgtctgtcgcgtcggcggggtccttctcgatcgggatggtggtcacctcgtcggtttcgatggcggttgcacggaagtacatgccgccgggttcgatgtaggaggtcgccatcgcgtacagcttgccgttgcaggacgtcgcggcgggctgcagggcgcgtgcatccgacgagcgtttgacgtacggcgcgaacttcgtctccccggtatgcagcaggtaggtgtctgctttgccgtcttcggagagcgggccgaccatggcgatgccccccttgacggcggcgaacgtgcacttcgtgtcgccgtcggcgaatgcggggaaggcgtcggcaagctcgatgccctgaccgttttcaacggcttcgaacgtgccgtcttgcgtatcgtagacgtagagcacgccgtcgctcgctatcgcttgcgggttgacgtgggggatggcgagcgttgcgaagctgtcgagtgcgccgctttctgggtcgtaggataaaacgctgctcgccttcgcgatctcttcgagaagggcgtcttcgtcttcgcttgcgggggcatcgcctccaacgagcacgacaacgtcgcccacgcttgcgatggtggatccgtctgctatgccggctgcgggaagcgcggtccacgagccgtccgcaggatcgtaggcgtatacgcgaacctccgctttgccggcctcggcgggattctcgtatccccacgtgcgcggcacgccgtcggagaggatctccatggtcgtgcctttcaccaagagctttccgctccattgggttgcggaggcgtttgcgaggggttcgggcagcgacgctgctttcgtccaggttccgccctccgtgccgtagcgccacatgctctgtacgaacggggcgttttcgatgagctcgaagcggggcagggaacagacgccgccttccagggcgacaaggatgccgttggtttcaccgtcgacgagcgcggtctggctgtagggatcgtcgtcggcgggaaggggaagcgcgtcttcgtaaaccgtatcgccggggcttatgaagcaggtgcgggttgaagaagctccttcggcagtggttacctgcacttcgacgatgcccgaaagtgcgggctctgccgtgatctcgatggcggtatcggtccagctgtcgatggacgccttgtaagcgagcgcgtcgtcgccaagccctgcggcttctatcgcgacggctccttctgcactgccgaaatacgaaccccgcacggtagcggcggttccctttgcttccacgccggcgattacgggttcgtaggcctcggcggaaggtgtgccgtcgatggaaaggtcgatgacgccgcccgaggaaacggcatcggacagtgcggggttcgcgcgcacgctcgccttgacgcgggccgcccgctcggcagcgctgtcgtcggggtatttcgctgcgagcacggcggtcgacccggcaacggagggcgttgccatggacgttccgttcttgtagccgtagggcacctgttgcgtgccgatgccgagcgagtcgatccagacgggcagcgtgcccgccgatacgaggtagacgcgcatctcgaaatcgtcgaagtcgatggaggcatcggtcggaagcgaatcggcgaaagcgtcccatgtttgcccgactccgagcgccgaaaggtaggaaccgcccgattcggaaagggagagccactgggcgtttccgtcggcatccttgctcgtcgtcttgatttcgatctcctgcacggtcagggccgcgttggtgctgtagagcgaaaagccgatccacgcgtcggttcccgctgcgggttcggctatgggtccggtcgccttgaattcgatcccgaacaggctgctcgacttgccgaaggcggcgatgggttcgagttcggcgtagaggcttcccgatcccgtgaaataggtcgaggcgtcgatggcgcccgtgccaagcggctcggtcgtgccgtcggcatgcagggcgcttgcctcaaacgcgcttgccgcgccgtcgaagccttcgtagacaaggttctcgctgggatcgaccatgtcggggaagtaagaggaatgggtttgcggtacggtggagaggatgccgcctgcgggcgcggcgaggctgaccgtcgccttgccgtagttgctgtgcgaccacaactcgtcggaggtattggttcccgccacggagacggcgtaggggttgtctttcaggatgccgcccgagacgacgttgccgtcaatgtcgaggccgtcgttgccagcgccgaacaccgatacgatcccgcatgattccccgagatcgcgcactgcggcatcgagcgcgcggctcgactggtacagcatccaggagttgctcgtcacctgcacgtcgattccctgttcgagcttggccttcttgatgaacgcgtaggcgttgagctggtcgacgagcgaagaggtggacgcaccgttcttgatgaccatgagcttcgcgtcggatgcgaccccgcttgtcccgctgccgttccactcggcggctatgatgcccgcgcaatgcgtgccgtgcccgatgtcgtcggtgacgtcggccgggtcgacggcggggttggctaccgattcggagttgaacccgaactcgccgcagccgagggctttctgcttttggacgtcgaaccggtagatcgagttcaccagatcggggtgggtcgtgtcgatgccgccgtcgaggatcgccacgatgacgtcttcgccgtccatgttgccgcccgcttggttccaaagcggggcgttgatgctcgcgttcgcgcttgaaccgggggttttcatggtgttgccgcccgcgaaagcccactggaaccgcgaaagatcgggaaccgccgatggggtggcagaaccctgcgccgcccgagacgctgtttcggcgtttgcgacggcggcaggcgccgcctcgtcgaagccgatctcatcatccgctttaaggtcggcgagctcgatgtcggtgtagttgggctcggcggagatgaccgtcggatcgtctgcgagcgcatagagcagctcctcggtgctcagcgtgtcgctgcgcacgacggagatgctgccgatcgaagcgctgccaagcgcgttgcgcgcagcagcgtcgcctcggtcggcctcgatcgcttgggcgtcgatctccatgatcggctcgaccgcatcggctgctccgtctgcttcgagggcaaccgcttcgacggcatcgccgctcgttacgacaacggcttcgccttccgcgtacgatcctgcggcgagcatgtccggaatgtcgtcggtccagctttcgggcgcagccgttgcttcgcctgccgaaaggacgggaagcaggccgagtgccaaagcgaaggcgaggcatgcgttgagcgcagcccgccttcttcccatcgcggtgtttgaagcctcgaaacgcggtgtcgcgtgcgagctgggactttgcggtgttctttgcatcgaacagccctttctagaaccagtggaaatgtatgcaccacaataaggttcaagcaacaacagaggagcaacaaggatcgtttcgttcggtcctaggacgatttcggcgcatgccgaggcggcctgccttctgcctttcggaatgtaacgattttgggatgcgggccttgcgattgcggcccttggcgcggcggccgcctcgcggcggttcctgcgataaggcaaacagccgtgccgtatcggcataaacccgatacggcacggctttcaggttaatgcgtcgcgaaagttgggggagtgcagccaagccgaaccaagctgccttttgcacgggaggcgataagattttcttgcatagcgcgaaaaccgtgctatactatgcaggctgtttactcaagcgggaaggaattccccacctgattcggcgcttcggctgctgatgggttgcctgaatatatgccgcgcaagcggatatgatatgcaagcaagcccgtggccgagttccgcgggtttttatttgcgcgcaagcgcaagaacgaggaggtgagcgcgatagctgctcaggagccacggctcaacgaagagattactgccagagagtgccgtctgatcggctacgacggtgagcaactcggaatctatgcggtttccgaggctcagcggatcgccgatgagcagggctacgatctcgtcgagatcgctccgaatgcggaaccgcctgtgtgccgcatcatggattacgggaagttcaagtacgatcaggctatcaaggccaagcaggcccgtaagaaccagagcaagatcgagacgaaggaaatgaaattccgtcccaagatcgatgtgggagattacacgaccaagaagaaacacgtgctgcgtttcctcgatgcgggcaacaaggtgaagatcaccatcatgttccgcggtcgtgaaatggcccatcccgaacaggggttgacgatcttggagcgtttggcggatgacttgaaagatcaagcggtcattgaaagccagcccaagatggagggccgcaacatgcacatgctcatctcgcctttgcccgctgcggcgaagaaaaagaaagaagcagagaaacaagaagatggaaaggacgagtaatgcctaagatgaagtcccaccgcggcaccgctaagcgattccgcgttaccggttccggcaagatcatgcgctccaagcagggttcgaaccatatcctggagaagaagagccagaaacgcaagcgcaatttccgccatgaaaccgaggtttccgaggccgacaagaaggtcgtgtcccgcaacctcggactccgctagtcgattaggaagggtttgaacaatgcctcgtgtaaagcgtgcagtcaacgctcataagaaacgccgtaccgtcctcaaccgcgcaaaaggctactacggtgcgaagtcccgctcctatcgtgccgccaaggagcaggtgcagcattcgctccagtacatgtatcgcgatcgccgcaataagaagcgcgagattcgccgtctgtggattacccgtatcaacgctgcggcccgtatcaacggcctgtcttattccgtgctgatgaacggtctcaagaaggccggcgtgcagctcgaccgcaaggttctcgccgacatggccgtcaacgatcctgctgcgttcgcagcggtgaccgaggttgctaaaaaagccctgtaggctttcctcagataaaagaacaagagcgcttccgaagaatcggaagcgctcttgttgtatgcggaacttcattgccgaagacagggagttccgcgttctcgcaggtgcaaagactctttacacttccatgcagttcggcgtttcctcgtcgtagtcgcaccattcatcggagctgatgagcgtttgggcgaggtaggcttcggttgcggcgcgcgcggtgccgaccaccccgaagaccacctcgatgctcgcttcggtcagcgcatggatggacgctcgttccatgcatcccgcaatgaccacgtcaacttcgagttccaccaacagcgatgcgagactgccgtaaggcagccgcggactgggcatattctgacattcggcgattatgccgcagtcgatcgtgtagatggtaaaactggtgcagtgttcgaaataaggcgaaacgtcaaggccctcgctcgcaaccgcaatcctcatggcgttcctttcatggcaaccttgtaacagttacaatacgtgattctaggtattgggtgttccttcttccgccaaacgggaagaaatagtaagcttgcggcatgaagaaactgactgattcatactttgacgtcgtggtgatcggggcgggagtcgccggatcctgcacggcgcgcgagcttgcccgctatgatgtttccgtagcggtgctcgaggcggacggcgatatcgcaagcggtgcaacgagggccaattcgggcatcgtccacgcgggctacgatcccgaacccggcacgctcaaggcgctctataacgcacggggctccgctctctatcccgcgtatgcgaaagaactcgggtttgcctacattaacaacggatcgatcgtgctcgcgttttccgatgaggagctgggcacggtacgcgagctggtgcggcgggccgaacgcaacgggatcgatggtgtgcgcgagctttcccgggcagaactcagagaacgcgaaccgcatgtgtcacgcgctgcggtcggagcgctcttcgcgccgaccggggcgatctgcgatccctacgaggttgcattctctgcggcggaaaacgctgcctcaaacggagtggaattctttttcaacgaaggcgtgcgcacgattcgtcctattgatgatgtgcggggcaaagcgcgtttcgaactggtcgcggaatcgggcgcgcgggtcagggctgctgcggttgtaaacgcagcaggtgctttcgccgatgagataaacaaccaaatcagctcctcgaagctgcgcatcacgccgcggcggggcgagtattgcctgttcgataccgatatgggcgatacgtttgccagtacgatgttccaggcgccctcgacggcgggcaaaggcgtgctcatgacgccgaccgtgcacggcaatctgcttgtcggtcccaatgccgtggcgcagtcgggcaaacgggatgtgtcgacgacggccgaaggtttggcgttcgtcctcgaggcggcgaagaaaacgtggcccgaactctcgacgcgcgggatgatcacgaatttcgcaggattgcgggcaagcggcgagagcggcgatttcgtcttgggcgagccgtccgatgcgcccggattcttcaacatcgcctgcttcgattcgcccgggctcacctccgctcccgccgttgcgatcgatatcgcacgggccgttgcggagcgtctcggggcgccgatgaacgaatcgttcgatcccatgcgcgccgccgagaagccttttgcgctcatgagcgatgacgagcgggcacgtgcgatcgaagcggacgggcgctacggccatgtggtgtgccgttgctgcgaggtgaccgaggcggagatcgccgacgccttccgaagcccgttgccggtgaactcgctcgataccctgaaatggcgcacgcgtgcgatgatggggcgctgccatgggggcttctgctctcccgagatcgttaggatcatggcgcgtgagacgaatacgccgcccgagcgcatcgataagcggatcgcagggtcgttcgtagtcgaatcgtcccgtcccgattacaccgaactgtgcaagcgcgaccatgcggttgcctgcgggtccggcgggggggttgcggaatccgcagacaacgcggcattcgacgttgccgtcgtggggggcggagctgcaggaatcgccgcagcccgctcggcgctcgccaacggcgcccgccgcgttgcgctcatcgaccgcgaagcgaagctcggcggcattctcaagcagtgcatccataacggattcggcctgcaccgcttcggcgaggaactgaccggtcccgaatacgcgcagcgcgagatagcggcgctcgagaaaagcggggcgaccgtgttcggcggcatgtcggtgcttgccgtgcgtgcgggcgggggcgcttcccatgaggtgatcgccgtgagcgagggcgggctgcggaccatccgtgccgattccgtcgttttggctacgggttcgcgggagcgcggcctcggcgccctcaacgtgtcgggcacgcggccttcgggcgtgttttcagcgggcagcgctcagaacttcatgaacctgcaggggtgtctgccgggaaagaacgtcgtcattctggggtcgggcgatatcgggcttatcatggcgcgcaggctcgtttcccaaggggcgcgagtccttggcgtgtacgagctcatgccgtatccctcgggcctgcggcgaaacatcgttcagtgcctcgacgattacggcatacctttgcatctgggctgcaccgttacacggctcgagggcgaagggcgtttgagcgcggtcttcgtttcggatgtcgatcctgaaacgaacgagccgattgcgggaaccgagcgtcgagtggcgtgcgatacgctgttgctttcggtggggctgctacctgaaaacgaggtggccaagaccgcaggcatcgcgcttgacccggtgacgggcggcgctttggtcgataacgatctcgaaaccgacgtggcgggcttgttcgcctgcggcaacgcgctccatgtccacgatctcgtcgatcatgcttccgcagagggcgaaatcgccgggcgcgcggcggctctgttcggcatgcgcccgcacgggggcgacggcgcggcatccgttcttgcgggcgagaacgtgcgttacgtggttcctcagcgcatatcgccgaataccgatgcggatgataccgtcaccctctcgtttcgggttacgggaacgatccataagccgcgattccacgtcgagggcatcgacggcgcaggcgaggtgcatcccatcaaaaccgcgaagaccatggtggccgttcccgccgagatggtccaggtgaagctcaagggggcagacgttgccccgtattccgccgttcgcgttcgggcggagggcgtcgggggcgccgagggcgctcgcccctcaccggggagcgttcctcgcaaggcgaatggttccgatgggggaggtgccgaatagatgcagtttgccaccgaggtcaaaacctatacctgcatctgctgtcctctcggatgccagctcgaggtgtctttcgatgaggaaggcgcattatcggaggtttcgggctacacgtgcgcgcgaggtcgggaatacgcgctggaagaggcggtgaggcccgtgcgcatggtgacggcgatcgtatgcgccgagggcagcctcgagccgctgagcgtcaagacagcggcacccgtgcccaaggaatctctcgccgatgtgcttgcggcgattcgcgaacttcgtccgaaggctcccgtcagcgctggatcggtgctcgtggaagacgtgtgcggcacgggcgtcgccgtcgtcgcgacgaaagacatcccctgacgcggaagcgagaccgctcgtgaaaagcgcggcgcatccggcttccgtgctcggtgatttgagctaagctttgcttgcgcgcgagggcacgcagagcttagcgaaagacgggagcgtttcgatggctgacgaacaaaacagggatgggggaaaggccgcccgcatcgcgggaacggcccttgccgccgtggggacgcttgcggtcatcgttttggccacggtcgttctttttctgacgcttgcggcgctcttgaggtctgaatggcttttcgcggcggtcggcgccgttgcgttcgttttgatcctcttcctgctggggcggcttattcgcgtcgccgcgaaccagaataaggacccgctcgattagcttcgcggtttccgtaggcgcgttgccgttgcttggctctcggctgaaccgggcgccttcggcatccgtaaagccgatcggctttacgtcgtcgtgcgaggcgcggccgaccctagcggcttctcctcttcgccaccgccgctcgatgtgcacggcccggccgcatatccgatcccgatttcctctgggacgcctgcgagggtttcgaagcttgctgcggcctgcccgtcgacttcttctgcgcgggtttcgactgcgaaggtttcggctgtgccggctttgccttcggcgatttcgcaaccctgttgttggttttcaccggcgcttggttgggcgtgcgggattttttgcggctccctttgcccgagcgcgacgcttcggcggcggaatcggctgccgtgcgcgctgctttcctctgctgcgttttggcgtattcggcggcagcggcggcaagctcgggatcctgtttgccggcagccctcgtcgcgcgggctgcggcggctgcttcggcttcttccagatcgaagctttcaagctccatctcggggatcgtttgtttggtgagcttctcgatgtccttgagccagggcttttgctcgggactgacgaacgatacggcgaaacccgtttcgccggcgcggcccgtgcggccgattcggtggacgtagtcttcgggctggttgggcagatcgtagttgatgacgtaatcgacctcggtcacatcgatgcctcgggcgagcacgtcggttgcaacgagcacgttggtcttgcccttggcgaagttctcaagcgcacgtttgcgttgggcttgagaacggtcggagtgaatcgcctcgaccgcatagcccgcacggcgcaaacgcctcgtgcaggaatcggcgcgggagcgcgtacgggcgaacacgatcacgcgattcgatcccttttcctcgagtaccgctttgagcaggtcggcctttgtggtttgcgtggcggggatgacgaactggtcgacggtatcggccgtttccccccgatgcgcgatttccacgtatgcgggatcatgcagcagcgagccgacgcttttggttatctgatcgtcgatggtcgccgagaacaacagggtctgtcgtttgctcggacacgcggcgatgatcttcttcatctgcggccagaaccccatgtcgagcatgcggtcggcctcgtcgagcacgagcacttcgacattcgagaggcgtaccgcatcgcgttccatgaggtcgatcagacggcccggcgttgcaatgaggatatcgacgccgtgcttgagctgtttgatttggggatcgagcgacagtcctcccacgacggtcaggatgcgatgatgggttgacgttgcgatggcgcggcacacctcgccgatctgatcggcgagttcgcgcgtggggcttacaacgagcatcagaggcccttggcctcgttggatgcggccgagccgatccatggtgggaagcgagaacgccgcagtttttcccgtgccggttttcgcggcggcgatgatatcgcgtccttcgaggacaagcgggatagcctgctgctgtacgggagtgggctcttcgtagccgagtctctcgacggcggcaagggtcttctcggataggccgagttcgtgaaatgatgttgtcataatctccggaaatctatggtcagcaggcgccgcggacgaaccgggcgttcatgtcttacaggtcgctcgccgttgtcaggcgattgcgccgtatggcgcacatcagttcattatcgcgcatagaagccgatgggggcaaggatttcttcattgtcaacacaaaggagccgttggagcgcgggggcggggcggtgtcgggcggctgagcctgcgtcttgcacggactgatgtcgcgcaagtgcgagcggccttcgcacgggaccctcagcgaatgtgggccggcttcttgccccagtaaatccagaggaagcgcttgcggtgttcgacgagttcgcgggcaccggccttctcgatgaggcgaaacgccgcacgggcgatttcgagggccgcctcggggcgtctgatgatgccgccgttgatgagcatggcttgggtgctttgcgggtacttcgctatatggcgcaggctttcgagcagctcgcgggccgtggttacgtgcatggcggctccgacggcggtgagcatctgcacgttcgccttctcctggccgtaggcgcgcccgagcaggatcatggggacttgcgcgcagaggcattcggtgacggtgagtcctcctgatttgcagatgaccagatcgcttgccgccatgagtgcggccatgccgtcgacgtagtcgaggacggtggtgttttcgagtccgagttcggcgcactgctggcgcatgtgctcggcgtagtgacgatcgcttcccgcgatgaacacgaaatgcatgccgggataggtgtgcagatagggaagtatcttatcgagcgtctccctgaaatgaacgtagggacgcggcaggtaggcgccggcgagggcaagcacgaccatcttatcttcgggaaggccgagcttcttgcgcgtttcgtatttgtcgtaggttttgcggaaatcgtcgcgtgtggggatgcctgtgatgaggatgctgtcatcgggtactttgcggggtctgagcgtttcagccatcgattcggtggcgacgcagaacagatcgctcgttcggtgcggccacaggccctcggtctcgtaatcggtcggcacgctgaggatggggtagtgctggccggttatcatccttgctcccacggcgacgttggctgcagtgatgtgtgtgcagatgatggcgagcggtttcttctcgcgcacgtgttcggtgaacttcgggaaattgacgtgcgaccagatggtgccgccgccccagagcagcctgcctgtgagcgtgtagcgccacgtgagatcgtagagcgggcgggtggccccggtgaacaaactcgctgccttgtcgccgtcgaagatcactcgtccgaagtcgaggatatcgagcacctcgacttcgaggtcctcgggaacgtccaggccctgcaaaagctcgggatcgtcggtttcgcgaaggatttcaagcgcttgggccgttgcgttcgctgcgctgcgatgccccgatcctaccgaggcatgcatgacgatgatggtgggatggctctccgtctgcccttcgtctgaaacatccgatgcgtcggcggtttcgggaaccgtcgattcggcagggctatcggaggctgggaggatgtgttcgtcgttttccatgcggaatatcatagcagagatagccgcagcttcgcattgagggagggaaacgcgaagctgcggccgtatgattcacatgtctcgaaccgatgggacgaaacatgtgacgggatggatggggattcgggtgcttttagagttcggcgaccgccctgcccacgagatatccttcggtgtagcaacggccaagcgagaggcccgggatggtcatggggtagtcgacgccgccgtagaactcgcccgagcagttgccgatggcgtagagtccttcgatcgcgcttccttcgggggtgaggcactggtggttctcgtcgacctgcacgcccgagcacagcgccgatacgcgcaaccagcgatggatgccgtagaacgggggcgtatcgatgggttggaggtactgcgacggtttcccgaagtcttcgtcggcgcctgcggcgacgagctcgttgtagcgctcgatcgttttcacgaacgccgcagtatcggttatctcaagcttttcggcaagctcttcgagcgtatcggctttgaacgtgcggatgaggtctttgaacacgccgtcgcggttctctacatcttcttcgggcatgtagagagcgagctcctcgggggaatagagctttccgggccaatcggcggcctgggtcatgtagttggcgtcgaacacctgagagtaccagccctggtcttcttcggagcgcaggtagttgttgagaagcgacatctccacgacttcgttgacgaagcgggttccgtcgttctttacggcgaggaagggcatgtcgcacatcgaagcgggacccgcatcgaaatcgtggagcatcttcgtgtggttgatgtgctccatggcgccgcccgcccagatgatcatcttgtggccgtcgccggtcttgttcatctgcttgcgcgtgaagtttgcgaggtcgggcaggtaatacgagctcatctcttcgtcgttttggtaatcgccggttgcgatgatgacgccctttttggcattgaactggatgtagccgtttgctcccttggcgatgacgccggtgacagcttcgccgtctttaacgagctgctcggctggagtcgaatagaagatctcgacgccttccttttcggccgtctcggcaagcgcccgcatggcatctcccgccgtcaggggtttggggcctgcaaacgacgtgacgaactccatggtccagccgtttttggcgatggtggccgcctgctgctggcttccctgatcgacgatcggcccgccgctttcagccgagcgctcgataacccatttcaccgcttcgccgccgtgctgggcccagagttcgaggagctcgcgcttggtgcggtgctgcccttcttcgatgagaaccgaaacgaggttctgcacgtctgccgggtcgctctttgaaagatcgacgcccgaaccggtattgccttgggagatggcggtcgcctctttctggatgagcgcaaccttggctcccgcttccgctgcggaaagcgcggcgggaacgcctgcggctccagcgcccacgacgacgacgtcgaaatccttcgtttcggcaatgtcggtgatcggggcgggcgtttgcaggaagctcggcagtcccgaacgcgtgtggccggcggccgtcgtcgtgctctcggctgcgctcgttgcgccgtcggaacccgttgagccggtgctggggctgcaggcggaaagcgcgcttgctcccatgacgcctgctgcggcgatgcctccgatcttgaacagatcgcgacgcgtaactcccgaacggttggatcctcccatggtctcctccttgaatcgtgaagcacgaagctcgtgctggtggtgatgtgcggcgccgttgcgcccttgggcagaactctacgcggatcgggcaaagccgtcattcgtccgttgggaaaaatgggggatgatttcgataaccccctcgcatcaccctatgatgaacaggtaaaacaagagaatctatgagatttgtacgcggcggacggttggttcgcgcagcgctttccgatacaatggcagcgacgagaggacggctgaggcgttgatcgacgggatgggatcgtgacagagcagagagccgagaggcaagatgttgcagaagacgggcccgcactcgcccggggcgggctgatcgatcggctgccccacataccgttgttctttctcgggctcggggtgtatcgcgcttggatagaggtcgtgttcgtgggatcgttcgtcgagtttcccacggcgcagtacgcgggtcacaacgtgttcgacatagccatgatcgtcactctgttcgcgtgcgccttcgcttcgaaaaggctcggggcgttcttcagcaggcgatcgctgcattggtgcgccggagtggcgctcgtcgcttctactctcggtgttttctcatcgatgtacgcacccgacctcgcccccgtcgttgcgacccctgcggctgtcctcgggggattcggcatcgcgctcgtcatcctgttctggtccgagctgtacgggtgcttgaaccccgtcagggtcgccctgtactattccgcctcgatcatcgttgcggcggtcgttctgtacatctgcagggggtttctgtatccgtggctgttcgctgcagccctttcgatgccccccgtctcgctcgtgtgcctggctttggggttccgctcactgcccgaaagcgcgcttccccgcgcccttgggggcaaattctcgtttccgtggaagcccgtgcttttgatggccatctatgcgtttgcctacgggctcaaggggtcctcgatgtacgcggggcccttcggcccgcactcggcattcggaaccgtggcggtggcgcttgcggtgtttgcgggcatcgtcgcacgcggcggccgtttcgatttcggggcgatctaccgcattgccttgccgcttatggtggcggcgtttcttgtgttgccgagcctcggcttcctcagtaacgcagcagctgatttttgcgtaaccgcttcttacacggcgttttccatccttatcatgctgatccttgcgaacatgagctatcgctacgggatatcggcgatctggctgttcggcatcgagcgcggcgtgcgcgcgctgttcagcctgctcggcagagagaccgagacggcgttggggtcgcttgagatcgcgggcgtgtcttcggaattcgtcctcaacgcgatcgtgatcctgcttgttgtggcgcttacgatgatcctcttctccgaaaaggagctgtcgagcagatggggcgtgacctttctcgggggcttggatgccgaaggcgatagcgccatcgtcaagaagcaggagcttgcgaaccgctgccacgaggctgccaagcgataccagctttcgcagcgcgaagaggaagttcttttgctgcttgctcagcgcaagacggtaggctccatcgaaaaggagcttttcatcgcgaacggcaccgccaaaacgcatattcgccatatctatcgcaagctcgacatccattcgcgcgacgaactcatagaactgctcggcttgtactcctgacgacgtacggattcttacgaaaaggtgacgggcgaaaaatcgcaggttcgctgcccttgcgtgcagctagactacgtaatcgcaatgaacggggcgcgccgcgtaaactcgggctcgtgcatgcggcgcgcgttcgcgctcggtcggatacgggtgcggccggatcggcggctgcctgccaacgccgctttgcccgtacagagcgaaaccatgctcggcaacgatggattcggcaacgccggccgccgcgacacgactttgagaaggcatcatgtttcagaagttcggacagaagtttcagcagtttatgatcgggcgtaacggcccggacgacctttcgcgctttgcgctgttcgcggccttcctgttcatgcttgcgagcgtgttcgtgagcgacgcagctgcgagtcaggtgctcatcgtcatcgccttcgccggcatcgcctactgctattttcgcgtgttctcgcgaaaaacggggaatcgctacaaggaaaaccgcatctacgttggcgttcgcaccaaggtcactgcgccgcttcgccacgggtacgcgcgtttcaaggaatggaaggcctaccacaagacgcatcgcatctatacgtgcaagcagtgcggtcagagcctgcgcgttccgaagggcaagggcacggtgagggtgtcgtgccccaagtgcaaaaactcgtttaccaccaaatcgtaaggcggcgtttctttctcgggtcccgtgcgcgcggcttccgagcagggcggctcctttctggcatttcgggagatttcgggtcccgtcccctgattttctgaactgccgatattttctcttgcattcccgatggggctttgtaataatgttcaagctgctttttcgggatagaaaccgaatgcgagcacgtccccatagtctagaggttaggacgcggccctttcaaggctgagacacgggttcgattcccgttgggggcaccatcgaaatctgcgggcgccttcgggcgcccgttctgcttttccggggcttcgggcgagaggtcctctcgttcgactcgctgcttttaacctaggccatcctgccgatgaggaacccgatgaccgtgcacagcatggcgaatgctcccgagatgagcacgagcaggtagtcgcgtctttgctggcggcgcagttcgcgttctctgcgggctttttccgtaaagaaagagtagccggccgaggttatcgtcacaacgggctcggttgtgccgtcgggggcggtttgaggcatgagggcgagggcgcccagcgatacgagttctccttgcagctggttatcgggtcggtaggggaatgcgcacctgcggcctcggccctcggctgtcgcgctcttggcgcgctcgaactcgatgagacggatgagctccatttcctgctgtatgttcaaatggatctgggccatgagcggtcgcatgctccttttctgcttcgtttcgctcgatgcgcgaatgcgctcgcgttgccgtttcgttcattgtgccacagcatgtcgccaagttgtttgcaattttaccgacctgtcaggttggtgcggggcgaggtgatcccggcgtggggcagcgatggttgaacggaggccggacgcctgctttgcgatcggccggcaacgcgcgtttgcgaaagggcggtcgtcgagatcgcgggttcgcggatgcaagcgcggatgcaagtgcggatgcggcttcttctaggtgcgggcgcaaacgcggatgcggcttctttcgcccgcggccttcctcggagaaaaccgcttgaaaatggcggtcaagctaagcttctgtcgagaattcgggccgaaacgggcctcttcgccggctttcttggggttctggtttttgcgacctgcgcaaacgctgattgagatgctcttcggacgcgacaaaggtggcagaagcttgccttgaccgccatttcggatggcttttttgaaatggaagatcatacttggccgcggtgaagagggctctttggggaaaatcgcgttgcgggcggcgagtgcatacggcgccgcgcgcttattttgcgaggccgccctttcgttgccgaccggctccttgcaacagattgggcagctgcgaaatgacgacgccgacgaggatgacgacgacgcccgctgcctgcagcaggctgatgggctcttgcaggatgaataccgaaatgagtatcgccgcaggcagttccgacgatgccatgatggtcgatatgcctgccggcaggtggggggttccgatgccgaagaggatgaccggggcgaacagcccgaaaaagccgagcacgaggccgtatttccagattcccgcttggatggcacccgaaacgaagtaatcggggcaggcgatgagcgcgagaatggaggctccgcagcatacgatgagccccctttgaatggaaggcatcgacgtttcgattttgcccgaaagataaacgaatgcggcgcagctgatcgccgaaaggagtccgcatgcgatgccgagcggattcagatcgggattcaaatcggcttcgaaaatgccgcttgcgaggaaggttcccccgaggatggtaagcgcggcggcgatttcggcgggcttcggggctcggcgcgtagttgcgatctggatgaccatgccgatccaggtgaattggaacaaaagcgttatggcgaccgatacgggaagcatcgtgagcgaatagttgtacagcaggcaggtcgtgcaggtcgtcatgcccagaccgagcagccgtatcacgctgcggggcgtgagcttgacgcctttcttgccgagaagggaccgcacgataaacaccgcggcgaagatgaacaggccgaagcacgcttggcttgcggctgtttgcgtccaggcgaacccctcgcggtacgcgaacttgaccgtcgtggccatgacgccgtagctggctcctgccagaaagacgatgagggcgtatttcaggggacttgcacgcatggcagacattctactgcacgtttgcgcttcggcgcgaaaaaacttgccgcaccaagcaatgtacgctgccgtgcgggcatcggcatgtcgacgcgaacggcggatggcggttggaagcccgtgtttgaccgtactgctgtgaaaccaatagttattgcgtacatcgagtgccttttgccgccgtggaaaacgcacccaaaattcattttcctcgctcttgaaggagaaagatagacctaacttttgacctgcgggtttgataccatcgatccagcgacggcggaaaaaacagtgcggaagcggacatcgggaatccaaccgcacccgccgccgcatcgacgcggccggcatgcggcgaatctgacagcgcggctgcgccctagcccttccgccgc
